(19) United States
(12) Patent Application Publication
(10) Pub. No.: US 2023/0002746 A1
(43) Pub. Date: Jan. 5, 2023

(54) BASE-EDITING SYSTEMS

(71) Applicant: Inari Agriculture Technology, Inc., Cambridge, MA (US)

(72) Inventors: Adam Patrick JOYCE, Cambridge, MA (US); John Paul ISSA, Cambridge, MA (US); Michael Andreas KOCK, Cambridge, MA (US)

(73) Assignee: Inari Agriculture Technology, Inc., Cambridge, MA (US)

(21) Appl. No.: 17/772,106

(22) PCT Filed: Oct. 20, 2020
(86) PCT No.: PCT/US2020/058186

§ 371 Date: Apr. 26, 2022

Related U.S. Application Data
(60) Provisional application No. 62/929,007, filed on Oct. 31, 2019.

(51) Int. Cl. C12N 9/22; C12N 9/78; C12N 15/11; A61K 47/64; A61K 47/54; C12N 15/90; A61K 38/46; A61K 38/50; A61K 31/7105; C12N 15/82

(52) U.S. Cl. CPC C12N 9/22; C12N 9/78; C12Y 305/04005; C12N 15/11; A61K 47/6455; A61K 47/545; C12N 15/907; A61K 38/465; A61K 38/50; A61K 31/7105; C12N 15/8213; C12N 2800/80; C07K 2319/80; C12N 2310/20; C07K 2319/81

(57) ABSTRACT

The present disclosure relates to base-editing systems including a fusion protein including a DNA-binding domain and a cytidine deaminase domain and a non-protein uracil-DNA glycosylase inhibitor, and methods of using the same. The DNA-binding domains of base-editing systems of the present disclosure include domains with a variety of target region possibilities, which increase the number and type of sequences that can be edited. The npUGIs of the base-editing systems of the present disclosure improve UDG inhibition (e.g., UDG inhibition is more complete) and are suitable for use in a wide range of organisms.

### CROSS-REFERENCE TO RELATED APPLICATIONS

[0001] This application claims priority to U.S. Provisional Application No. 62/929,007, filed on Oct. 31, 2019, the content of which is hereby incorporated by reference in its entirety.

### SUBMISSION OF SEQUENCE LISTING AS ASCII TEXT FILE

[0002] The content of the following submission on ASCII text file is incorporated herein by reference in its entirety: a computer readable form (CRF) of the Sequence Listing (file name: 165362000340seglist.txt, date recorded: Oct. 19, 2020, size: 3,827 KB).

### FIELD

[0003] The present disclosure relates to base-editing systems including a fusion protein including a DNA-binding domain and a cytidine deaminase domain and a non-protein uracil-DNA glycosylase inhibitor, and methods of using the same.

### BACKGROUND

[0004] Targeted editing of nucleic acid sequences, for example, the targeted cleavage or the targeted introduction of a specific modification into genomic DNA, is a highly promising approach for the study of gene function and also has the potential to provide new therapies for human genetic diseases (Humbert et al., Crit Rev Biochem Mol (2012) 47(3):264-81. PMID: 22530743). Many genetic disorders have been identified as having specific nucleotide changes underlying the disorder (for example, a C to T change in a specific codon of a gene associated with a disease; Cargill et al., Nat Genet (1999) 22(3):231-8. PMID: 10391209). In addition, targeted editing can be used for a wide range of applications in plants, including modifying sequences to add or improve desirable characteristics. An ideal nucleic acid editing technology possesses three characteristics: (1) high efficiency of installing the desired modification; (2) minimal off-target activity; and (3) the ability to be programmed to precisely edit any site in a given nucleic acid. Therefore, precision gene editing would provide an effective tool to precisely modify proteins and would represent a powerful tool suitable for a wide range of applications in medical, industrial, agronomic, and research fields.

[0005] There are a variety of current genome engineering tools that are able to cleave DNA of a particular sequence, including engineered zinc finger nucleases (ZFNs; Urnov et al., Nat Rev Genet (2010) 11(9):636-46. PMID: 20717154), transcription activator-like effector nucleases (TALENs) (Joung and Sander, Nat Rev Mol Cell Biol (2013) 14(1):49-55. PMID: 23169466), and the RNA-guided DNA endonuclease Cas9 (Charpentier and Doudna, Nature (2013) 495, (7439):50-1. PMID: 23467164). These existing tools can be used to mutate the DNA at the cleavage site via non-homologous end joining (NHEJ) or to replace the DNA surrounding the cleavage site via homology-directed repair (HDR) (Pan et al., Mol Biotechnol (2013) 55(1):54-62. PMID: 23089945). NHEJ and HDR are both, however, stochastic processes that typically result in modest gene editing efficiencies as well as off-target gene alterations (Santiago et al., PNAS (2008) 105(15):5809-14. PMID: 18359850).

[0006] Because of this limited efficiency, research has focused on developing composite genome engineering tools. These composite tools include additional components, such as uracil-DNA glycosylase inhibitors, to increase gene editing efficiency. In developing these systems, however, it has been found that Cas9 base-editing systems are limited in their ability to target some regions of the genome because Cas9 is highly dependent on the presence of a nearby protospacer adjacent motif (PAM). Further, base-editing systems that have protein uracil-DNA glycosylase inhibitors suffer from incomplete uracil-DNA glycosylase (UDG) inhibition, which decreases base-editing efficiency. Last, there exists the possibility that some organisms possess glycosylase variants that bind poorly to protein uracil-DNA glycosylase inhibitors, and thus provide incomplete protection of deaminated cytosine bases.

[0007] There exists therefore a need for genome engineering tools able to edit a target nucleotide sequence at higher efficiency with a reduced amount of off-target alterations as compared to the current genome engineering tools. These tools would address a need for efficient and reliable precision genome editing in medical, industrial, agronomic, and research fields.

### BRIEF SUMMARY

[0008] In order to meet these needs, the present disclosure is directed to base-editing systems including a fusion protein including a DNA-binding domain and a cytidine deaminase domain and a non-protein uracil-DNA glycosylase inhibitor (npUGI). The DNA-binding domains of base-editing systems of the present disclosure include domains with a variety of target region possibilities, which increase the number and type of sequences that can be edited. The npUGIs of the base-editing systems of the present disclosure improve UDG inhibition (e.g., UDG inhibition is more complete) and are suitable for use in a wide range of organisms. The base-editing systems of the present disclosure are able to specifically edit target nucleotide sequences at higher efficiency.

[0009] In some aspects, the present disclosure relates to a base-editing system including (i) a fusion protein including (a) a DNA-binding domain and (b) a cytidine deaminase domain; and (ii) a non-protein uracil-DNA glycosylase inhibitor (npUGI). In some embodiments that may be combined with any of the preceding embodiments, the DNA-binding domain is selected from the group of a Cas domain, a Transcription Activator-Like Effector (TALE) domain, or a Zinc finger (ZF) domain. In some embodiments that may be combined with any of the preceding embodiments, the Cas domain is selected from the group of a Cas 9 domain, a Cas12a domain, a Cas12h domain, a Cas12i domain, a CasX domain, a CasY domain, a C2c1 domain, a C2c2 domain, or a C2c3 domain. In some embodiments that may be combined with any of the preceding embodiments, the Cas domain is the Cas12a domain. In some embodiments that may be combined with any of the preceding embodiments, the Cas12a domain includes an amino acid sequence with at least 85% sequence identity, at least 90% sequence identity, at least 95% sequence identity, or at least 99% sequence identity to SEQ ID NO: 350, SEQ ID NO: 351, SEQ ID NO: 352, SEQ ID NO: 353, SEQ ID NO: 354, SEQ ID NO: 355, SEQ ID NO: 356, SEQ ID NO: 357, SEQ ID NO: 358, SEQ ID NO: 359, SEQ ID NO: 360, SEQ ID NO: 361, SEQ ID NO: 362, SEQ ID NO: 363, SEQ ID NO: 364, SEQ ID NO: 365, SEQ ID NO: 390, SEQ ID NO: 391, SEQ ID NO: 392, SEQ ID NO: 393, SEQ ID NO: 394, SEQ ID NO: 395, SEQ ID NO: 396, SEQ ID NO: 397, SEQ ID NO: 398, SEQ ID NO: 399, SEQ ID NO: 400, SEQ ID NO: 401, SEQ ID NO: 403, SEQ ID NO: 404, SEQ ID NO: 405, SEQ ID NO: 406, SEQ ID NO: 407, SEQ ID NO: 408, SEQ ID NO: 409, SEQ ID NO: 410, SEQ ID NO: 411, SEQ ID NO: 412, or SEQ ID NO: 413. In some embodiments that may be combined with any of the preceding embodiments, the Cas12a domain is SEQ ID NO: 350, SEQ ID NO: 351, SEQ ID NO: 352, SEQ ID NO: 353, SEQ ID NO: 354, SEQ ID NO: 355, SEQ ID NO: 356, SEQ ID NO: 357, SEQ ID NO: 358, SEQ ID NO: 359, SEQ ID NO: 360, SEQ ID NO: 361, SEQ ID NO: 362, SEQ ID NO: 363, SEQ ID NO: 364, SEQ ID NO: 365, SEQ ID NO: 390, SEQ ID NO: 391, SEQ ID NO: 392, SEQ ID NO: 393, SEQ ID NO: 394, SEQ ID NO: 395, SEQ ID NO: 396, SEQ ID NO: 397, SEQ ID NO: 398, SEQ ID NO: 399, SEQ ID NO: 400, SEQ ID NO: 401, SEQ ID NO: 403, SEQ ID NO: 404, SEQ ID NO: 405, SEQ ID NO: 406, SEQ ID NO: 407, SEQ ID NO: 408, SEQ ID NO: 409, SEQ ID NO: 410, SEQ ID NO: 411, SEQ ID NO: 412, or SEQ ID NO: 413. In some embodiments that may be combined with any of the preceding embodiments, the Cas domain is the Cas9 domain. In some embodiments that may be combined with any of the preceding embodiments, the Cas9 domain includes an amino acid sequence with at least 85% sequence identity, at least 90% sequence identity, at least 95% sequence identity, or at least 99% sequence identity to SEQ ID NO: 10, SEQ ID NO: 11, SEQ ID NO: 12, SEQ ID NO: 13, SEQ ID NO: 14, SEQ ID NO: 15, SEQ ID NO: 16, SEQ ID NO: 17, SEQ ID NO: 18, SEQ ID NO: 19, SEQ ID NO: 20, SEQ ID NO: 21, SEQ ID NO: 22, SEQ ID NO: 23, SEQ ID NO: 24, SEQ ID NO: 25, SEQ ID NO: 26, SEQ ID NO: 27, SEQ ID NO: 28, SEQ ID NO: 29, SEQ ID NO: 30, SEQ ID NO: 31, SEQ ID NO: 32, SEQ ID NO: 33, SEQ ID NO: 34, SEQ ID NO: 35, SEQ ID NO: 36, SEQ ID NO: 37, SEQ ID NO: 38, SEQ ID NO: 39, SEQ ID NO: 40, SEQ ID NO: 41, SEQ ID NO: 42, SEQ ID NO: 43, SEQ ID NO: 44, SEQ ID NO: 45, SEQ ID NO: 46, SEQ ID NO: 47, SEQ ID NO: 48, SEQ ID NO: 49, SEQ ID NO: 50, SEQ ID NO: 51, SEQ ID NO: 52, SEQ ID NO: 53, SEQ ID NO: 54, SEQ ID NO: 55, SEQ ID NO: 56, SEQ ID NO: 57, SEQ ID NO: 58, SEQ ID NO: 59, SEQ ID NO: 60, SEQ ID NO: 61, SEQ ID NO: 62, SEQ ID NO: 63, SEQ ID NO: 64, SEQ ID NO: 65, SEQ ID NO: 66, SEQ ID NO: 67, SEQ ID NO: 68, SEQ ID NO: 69, SEQ ID NO: 70, SEQ ID NO: 71, SEQ ID NO: 72, SEQ ID NO: 73, SEQ ID NO: 74, SEQ ID NO: 75, SEQ ID NO: 76, SEQ ID NO: 77, SEQ ID NO: 78, SEQ ID NO: 79, SEQ ID NO: 80, SEQ ID NO: 81, SEQ ID NO: 82, SEQ ID NO: 83, SEQ ID NO: 84, SEQ ID NO: 85, SEQ ID NO: 86, SEQ ID NO: 87, SEQ ID NO: 88, SEQ ID NO: 89, SEQ ID NO: 90, SEQ ID NO: 91, SEQ ID NO: 92, SEQ ID NO: 93, SEQ ID NO: 94, SEQ ID NO: 95, SEQ ID NO: 96, SEQ ID NO: 97, SEQ ID NO: 98, SEQ ID NO: 99, SEQ ID NO: 100, SEQ ID NO: 101, SEQ ID NO: 102, SEQ ID NO: 103, SEQ ID NO: 104, SEQ ID NO: 105, SEQ ID NO: 106, SEQ ID NO: 107, SEQ ID NO: 108, SEQ ID NO: 109, SEQ ID NO: 110, SEQ ID NO: 111, SEQ ID NO: 112, SEQ ID NO: 113, SEQ ID NO: 114, SEQ ID NO: 115, SEQ ID NO: 116, SEQ ID NO: 117, SEQ ID NO: 118, SEQ ID NO: 119, SEQ ID NO: 120, SEQ ID NO: 121, SEQ ID NO: 122, SEQ ID NO: 123, SEQ ID NO: 124, SEQ ID NO: 125, SEQ ID NO: 126, SEQ ID NO: 127, SEQ ID NO: 128, SEQ ID NO: 129, SEQ ID NO: 130, SEQ ID NO: 131, SEQ ID NO: 132, SEQ ID NO: 133, SEQ ID NO: 134, SEQ ID NO: 135, SEQ ID NO: 136, SEQ ID NO: 137, SEQ ID NO: 138, SEQ ID NO: 139, SEQ ID NO: 140, SEQ ID NO: 141, SEQ ID NO: 142, SEQ ID NO: 143, SEQ ID NO: 144, SEQ ID NO: 145, SEQ ID NO: 146, SEQ ID NO: 147, SEQ ID NO: 148, SEQ ID NO: 149, SEQ ID NO: 150, SEQ ID NO: 151, SEQ ID NO: 152, SEQ ID NO: 153, SEQ ID NO: 154, SEQ ID NO: 155, SEQ ID NO: 156, SEQ ID NO: 157, SEQ ID NO: 158, SEQ ID NO: 159, SEQ ID NO: 160, SEQ ID NO: 161, SEQ ID NO: 162, SEQ ID NO: 163, SEQ ID NO: 164, SEQ ID NO: 165, SEQ ID NO: 166, SEQ ID NO: 167, SEQ ID NO: 168, SEQ ID NO: 169, SEQ ID NO: 170, SEQ ID NO: 171, SEQ ID NO: 172, SEQ ID NO: 173, SEQ ID NO: 174, SEQ ID NO: 175, SEQ ID NO: 176, SEQ ID NO: 177, SEQ ID NO: 178, SEQ ID NO: 179, SEQ ID NO: 180, SEQ ID NO: 181, SEQ ID NO: 182, SEQ ID NO: 183, SEQ ID NO: 184, SEQ ID NO: 185, SEQ ID NO: 186, SEQ ID NO: 187, SEQ ID NO: 188, SEQ ID NO: 189, SEQ ID NO: 190, SEQ ID NO: 191, SEQ ID NO: 192, SEQ ID NO: 193, SEQ ID NO: 194, SEQ ID NO: 195, SEQ ID NO: 196, SEQ ID NO: 197, SEQ ID NO: 198, SEQ ID NO: 199, SEQ ID NO: 200, SEQ ID NO: 201, SEQ ID NO: 202, SEQ ID NO: 203, SEQ ID NO: 204, SEQ ID NO: 205, SEQ ID NO: 206, SEQ ID NO: 207, SEQ ID NO: 208, SEQ ID NO: 209, SEQ ID NO: 210, SEQ ID NO: 211, SEQ ID NO: 212, SEQ ID NO: 213, SEQ ID NO: 214, SEQ ID NO: 215, SEQ ID NO: 216, SEQ ID NO: 217, SEQ ID NO: 218, SEQ ID NO: 219, SEQ ID NO: 220, SEQ ID NO: 221, SEQ ID NO: 222, SEQ ID NO: 223, SEQ ID NO: 224, SEQ ID NO: 225, SEQ ID NO: 226, SEQ ID NO: 227, SEQ ID NO: 228, SEQ ID NO: 229, SEQ ID NO: 230, SEQ ID NO: 231, SEQ ID NO: 232, SEQ ID NO: 233, SEQ ID NO: 234, SEQ ID NO: 235, SEQ ID NO: 236, SEQ ID NO: 237, SEQ ID NO: 238, SEQ ID NO: 239, SEQ ID NO: 240, SEQ ID NO: 241, SEQ ID NO: 242, SEQ ID NO: 243, SEQ ID NO: 244, SEQ ID NO: 245, SEQ ID NO: 246, SEQ ID NO: 247, SEQ ID NO: 248, SEQ ID NO: 249, SEQ ID NO: 250, SEQ ID NO: 251, SEQ ID NO: 252, SEQ ID NO: 253, SEQ ID NO: 254, SEQ ID NO: 255, SEQ ID NO: 256, SEQ ID NO: 257, SEQ ID NO: 258, SEQ ID NO: 259, SEQ ID NO: 260, SEQ ID NO: 261, SEQ ID NO: 262, SEQ ID NO: 263, SEQ ID NO: 325, SEQ ID NO: 674, SEQ ID NO: 1869, SEQ ID NO: 1870, SEQ ID NO: 1871, SEQ ID NO: 1872, SEQ ID NO: 1873, SEQ ID NO: 1874, SEQ ID NO: 1875, or SEQ ID NO: 1876. In some embodiments, the Cas9 domain includes SEQ ID NO: 10, SEQ ID NO: 11, SEQ ID NO: 12, SEQ ID NO: 13, SEQ ID NO: 14, SEQ ID NO: 15, SEQ ID NO: 16, SEQ ID NO: 17, SEQ ID NO: 18, SEQ ID NO: 19, SEQ ID NO: 20, SEQ ID NO: 21, SEQ ID NO: 22, SEQ ID NO: 23, SEQ ID NO: 24, SEQ ID NO: 25, SEQ ID NO: 26, SEQ ID NO: 27, SEQ ID NO: 28, SEQ ID NO: 29, SEQ ID NO: 30, SEQ ID NO: 31, SEQ ID NO: 32, SEQ ID NO: 33, SEQ ID NO: 34, SEQ ID NO: 35, SEQ ID NO: 36, SEQ ID NO: 37, SEQ ID NO: 38, SEQ ID NO: 39, SEQ ID NO: 40, SEQ ID NO: 41, SEQ ID NO: 42, SEQ ID NO: 43, SEQ ID NO: 44, SEQ ID NO: 45, SEQ ID NO: 46, SEQ ID NO: 47, SEQ ID NO: 48, SEQ ID NO: 49, SEQ ID NO: 50, SEQ ID NO: 51, SEQ ID NO: 52, SEQ ID NO: 53, SEQ ID NO: 54, SEQ ID NO: 55, SEQ ID NO: 56, SEQ ID NO: 57, SEQ ID NO: 58, SEQ ID NO: 59, SEQ ID NO: 60, SEQ ID NO: 61, SEQ ID NO: 62, SEQ ID NO: 63, SEQ ID NO: 64, SEQ ID NO: 65, SEQ ID NO: 66, SEQ ID NO: 67, SEQ ID NO: 68, SEQ ID NO: 69, SEQ ID NO: 70, SEQ ID NO: 71, SEQ ID NO: 72, SEQ ID NO: 73, SEQ ID NO: 74, SEQ ID NO: 75, SEQ ID NO: 76, SEQ ID NO: 77, SEQ ID NO: 78, SEQ ID NO: 79, SEQ ID NO: 80, SEQ ID NO: 81, SEQ ID NO: 82, SEQ ID NO: 83, SEQ ID NO: 84, SEQ ID NO: 85, SEQ ID NO: 86, SEQ ID NO: 87, SEQ ID NO: 88, SEQ ID NO: 89, SEQ ID NO: 90, SEQ ID NO: 91, SEQ ID NO: 92, SEQ ID NO: 93, SEQ ID NO: 94, SEQ ID NO: 95, SEQ ID NO: 96, SEQ ID NO: 97, SEQ ID NO: 98, SEQ ID NO: 99, SEQ ID NO: 100, SEQ ID NO: 101, SEQ ID NO: 102, SEQ ID NO: 103, SEQ ID NO: 104, SEQ ID NO: 105, SEQ ID NO: 106, SEQ ID NO: 107, SEQ ID NO: 108, SEQ ID NO: 109, SEQ ID NO: 110, SEQ ID NO: 111, SEQ ID NO: 112, SEQ ID NO: 113, SEQ ID NO: 114, SEQ ID NO: 115, SEQ ID NO: 116, SEQ ID NO: 117, SEQ ID NO: 118, SEQ ID NO: 119, SEQ ID NO: 120, SEQ ID NO: 121, SEQ ID NO: 122, SEQ ID NO: 123, SEQ ID NO: 124, SEQ ID NO: 125, SEQ ID NO: 126, SEQ ID NO: 127, SEQ ID NO: 128, SEQ ID NO: 129, SEQ ID NO: 130, SEQ ID NO: 131, SEQ ID NO: 132, SEQ ID NO: 133, SEQ ID NO: 134, SEQ ID NO: 135, SEQ ID NO: 136, SEQ ID NO: 137, SEQ ID NO: 138, SEQ ID NO: 139, SEQ ID NO: 140, SEQ ID NO: 141, SEQ ID NO: 142, SEQ ID NO: 143, SEQ ID NO: 144, SEQ ID NO: 145, SEQ ID NO: 146, SEQ ID NO: 147, SEQ ID NO: 148, SEQ ID NO: 149, SEQ ID NO: 150, SEQ ID NO: 151, SEQ ID NO: 152, SEQ ID NO: 153, SEQ ID NO: 154, SEQ ID NO: 155, SEQ ID NO: 156, SEQ ID NO: 157, SEQ ID NO: 158, SEQ ID NO: 159, SEQ ID NO: 160, SEQ ID NO: 161, SEQ ID NO: 162, SEQ ID NO: 163, SEQ ID NO: 164, SEQ ID NO: 165, SEQ ID NO: 166, SEQ ID NO: 167, SEQ ID NO: 168, SEQ ID NO: 169, SEQ ID NO: 170, SEQ ID NO: 171, SEQ ID NO: 172, SEQ ID NO: 173, SEQ ID NO: 174, SEQ ID NO: 175, SEQ ID NO: 176, SEQ ID NO: 177, SEQ ID NO: 178, SEQ ID NO: 179, SEQ ID NO: 180, SEQ ID NO: 181, SEQ ID NO: 182, SEQ ID NO: 183, SEQ ID NO: 184, SEQ ID NO: 185, SEQ ID NO: 186, SEQ ID NO: 187, SEQ ID NO: 188, SEQ ID NO: 189, SEQ ID NO: 190, SEQ ID NO: 191, SEQ ID NO: 192, SEQ ID NO: 193, SEQ ID NO: 194, SEQ ID NO: 195, SEQ ID NO: 196, SEQ ID NO: 197, SEQ ID NO: 198, SEQ ID NO: 199, SEQ ID NO: 200, SEQ ID NO: 201, SEQ ID NO: 202, SEQ ID NO: 203, SEQ ID NO: 204, SEQ ID NO: 205, SEQ ID NO: 206, SEQ ID NO: 207, SEQ ID NO: 208, SEQ ID NO: 209, SEQ ID NO: 210, SEQ ID NO: 211, SEQ ID NO: 212, SEQ ID NO: 213, SEQ ID NO: 214, SEQ ID NO: 215, SEQ ID NO: 216, SEQ ID NO: 217, SEQ ID NO: 218, SEQ ID NO: 219, SEQ ID NO: 220, SEQ ID NO: 221, SEQ ID NO: 222, SEQ ID NO: 223, SEQ ID NO: 224, SEQ ID NO: 225, SEQ ID NO: 226, SEQ ID NO: 227, SEQ ID NO: 228, SEQ ID NO: 229, SEQ ID NO: 230, SEQ ID NO: 231, SEQ ID NO: 232, SEQ ID NO: 233, SEQ ID NO: 234, SEQ ID NO: 235, SEQ ID NO: 236, SEQ ID NO: 237, SEQ ID NO: 238, SEQ ID NO: 239, SEQ ID NO: 240, SEQ ID NO: 241, SEQ ID NO: 242, SEQ ID NO: 243, SEQ ID NO: 244, SEQ ID NO: 245, SEQ ID NO: 246, SEQ ID NO: 247, SEQ ID NO: 248, SEQ ID NO: 249, SEQ ID NO: 250, SEQ ID NO: 251, SEQ ID NO: 252, SEQ ID NO: 253, SEQ ID NO: 254, SEQ ID NO: 255, SEQ ID NO: 256, SEQ ID NO: 257, SEQ ID NO: 258, SEQ ID NO: 259, SEQ ID NO: 260, SEQ ID NO: 261, SEQ ID NO: 262, SEQ ID NO: 263, SEQ ID NO: 325, SEQ ID NO: 674, SEQ ID NO: 1869, SEQ ID NO: 1870, SEQ ID NO: 1871, SEQ ID NO: 1872, SEQ ID NO: 1873, SEQ ID NO: 1874, SEQ ID NO: 1875, or SEQ ID NO: 1876. In some embodiments that may be combined with any of the preceding embodiments, the Cas domain is selected from the group of a Cas nickase domain or a deactivated Cas domain. In some embodiments that may be combined with any of the preceding embodiments, the base-editing system further includes a guide RNA, the guide RNA has a length in the range of 15-100 nucleotides, and the guide RNA includes a sequence of at least 10 contiguous nucleotides that is complementary to a target sequence. In some embodiments that may be combined with any of the preceding embodiments, the DNA-binding domain is the TALE domain. In some embodiments, the DNA-binding domain is the ZF domain.

[0010] In some embodiments that may be combined with any of the preceding embodiments, the cytidine deaminase domain is an apolipoprotein B mRNA-editing complex (APOBEC) family deaminase domain. In some embodiments that may be combined with any of the preceding embodiments, the APOBEC family deaminase domain is selected from the group of an APOBEC1 deaminase domain, an APOBEC2 deaminase domain, an APOBEC3A deaminase domain, an APOBEC3B deaminase domain, an APOBEC3C deaminase domain, an APOBEC3D deaminase domain, an APOBEC3F deaminase domain, an APOBEC3G deaminase domain, an APOBEC3H deaminase domain, or an APOBEC4 deaminase domain. In some embodiments that may be combined with any of the preceding embodiments, the APOBEC family deaminase domain includes an amino acid sequence with at least 85% sequence identity, at least 90% sequence identity, at least 95% sequence identity, or at least 99% sequence identity to SEQ ID NO: 266, SEQ ID NO: 267, SEQ ID NO: 268, SEQ ID NO: 269, SEQ ID NO: 270, SEQ ID NO: 271, SEQ ID NO: 272, SEQ ID NO: 273, SEQ ID NO: 274, SEQ ID NO: 275, SEQ ID NO: 276, SEQ ID NO: 277, SEQ ID NO: 278, SEQ ID NO: 279, SEQ ID NO: 280, SEQ ID NO: 281, SEQ ID NO: 282, SEQ ID NO: 283, SEQ ID NO: 284, SEQ ID NO: 607, SEQ ID NO: 608, SEQ ID NO: 609, SEQ ID NO: 610, SEQ ID NO: 1878, SEQ ID NO: 1879, SEQ ID NO: 1880, SEQ ID NO: 1881, SEQ ID NO: 1882, SEQ ID NO: 1883, SEQ ID NO: 1884, SEQ ID NO: 1885, SEQ ID NO: 1886, SEQ ID NO: 1887, SEQ ID NO: 1888, SEQ ID NO: 1889, SEQ ID NO: 1890, SEQ ID NO: 1891, SEQ ID NO: 1892, SEQ ID NO: 1893, or SEQ ID NO: 1894. In some embodiments that may be combined with any of the preceding embodiments, the APOBEC family deaminase domain includes SEQ ID NO: 266, SEQ ID NO: 267, SEQ ID NO: 268, SEQ ID NO: 269, SEQ ID NO: 270, SEQ ID NO: 271, SEQ ID NO: 272, SEQ ID NO: 273, SEQ ID NO: 274, SEQ ID NO: 275, SEQ ID NO: 276, SEQ ID NO: 277, SEQ ID NO: 278, SEQ ID NO: 279, SEQ ID NO: 280, SEQ ID NO: 281, SEQ ID NO: 282, SEQ ID NO: 283, SEQ ID NO: 284, SEQ ID NO: 607, SEQ ID NO: 608, SEQ ID NO: 609, SEQ ID NO: 610, SEQ ID NO: 1878, SEQ ID NO: 1879, SEQ ID NO: 1880, SEQ ID NO: 1881, SEQ ID NO: 1882, SEQ ID NO: 1883, SEQ ID NO: 1884, SEQ ID NO: 1885, SEQ ID NO: 1886, SEQ ID NO: 1887, SEQ ID NO: 1888, SEQ ID NO: 1889, SEQ ID NO: 1890, SEQ ID NO: 1891, SEQ ID NO: 1892, SEQ ID NO: 1893, or SEQ ID NO: 1894. In some embodiments that may be combined with any of the preceding embodiments, the APOBEC family deaminase domain is an activation-induced deaminase (AID) domain.

[0011] In some embodiments that may be combined with any of the preceding embodiments, the npUGI is selected from the group of a small molecule inhibitor of uracil-DNA glycosylase (UDG) or a nucleic acid inhibitor of UDG. In some embodiments that may be combined with any of the preceding embodiments, the npUGI is the small molecule inhibitor of UDG. In some embodiments that may be combined with any of the preceding embodiments, the small molecule inhibitor of UDG is a compound of formula (I):

[chemical structure]

or a pharmaceutically acceptable salt thereof, wherein: R¹ is H, a furanose carbohydrate, a pyranose carbohydrate, a carbohydrate mimetic, C₁₋₁₆alkyl, C₁₋₁₆alkenyl, C₁₋₁₆alkynyl, C₁₋₁₆alkoxy, or C₆₋₂₀aryl, wherein the furanose carbohydrate, or a derivative thereof, pyranose carbohydrate, or a derivative thereof, carbohydrate mimetic, C₁₋₁₆alkyl, C₁₋₁₆alkenyl, C₁₋₁₆alkynyl, C₁₋₁₆alkoxy, or C₆₋₂₀aryl is independently optionally substituted with one or more substituents selected from the group of hydroxyl, halo, cyano, NO₂, N(R⁴)(R⁵), C₁₋₁₆alkoxy, or C₆₋₂₀aryl, wherein the C₆₋₂₀aryl is further optionally substituted with one or more substituents selected from the group of C₁₋₁₆alkyl, C₁₋₁₆alkenyl, C₁₋₁₆alkynyl, C₁₋₁₆alkoxy, hydroxyl, halo, cyano, NO₂, or N(R⁴)(R⁵); L is O, S, or *—N(R³)—**, wherein R³ is H or C₁₋₁₆alkyl, and ** indicates the point of attachment to the R² moiety and * indicates the point of attachment to the remainder of the molecule; R² is H, N(R⁴)(R⁵), or C₆₋₂₀aryl, wherein the C₆₋₂₀aryl is independently substituted with one or more substituents selected from the group of C₁₋₁₆alkyl, C₁₋₁₆alkenyl, C₁₋₁₆alkynyl, or C₁₋₁₆alkoxy; R⁴ and R⁵ are each independently H or C₆₋₂₀aryl; and R⁶ is H or halo. In some embodiments that may be combined with any of the preceding embodiments, R¹ is H. In some embodiments that may be combined with any of the preceding embodiments, R¹ is C₁₋₁₆alkyl, wherein the C₁₋₁₆alkyl is optionally substituted with one or more substituents selected from the group of hydroxyl, halo, cyano, NO₂, N(R⁴)(R⁵), C₁₋₁₆alkoxy, or C₆₋₂₀aryl, wherein the C₆₋₂₀aryl is further optionally substituted with one or more substituents selected from the group of C₁₋₁₆alkyl, C₁₋₁₆alkenyl, C₁₋₁₆alkynyl, C₁₋₁₆alkoxy, hydroxyl, halo, cyano, NO₂, or N(R⁴)(R⁵), wherein R⁴ and R⁵ are each independently H or C₆₋₂₀aryl. In some embodiments that may be combined with any of the preceding embodiments, L is NR³, wherein R³ is H. In some embodiments that may be combined with any of the preceding embodiments, L is O. In some embodiments that may be combined with any of the preceding embodiments, R² is C₆₋₂₀aryl, wherein the C₆₋₂₀aryl is independently substituted with one or more substituents selected from the group of C₁₋₁₆alkyl, C₁₋₁₆alkenyl, C₁₋₁₆alkynyl, or C₁₋₁₆alkoxy. In some embodiments that may be combined with any of the preceding embodiments, R⁶ is H. In some embodiments that may be combined with any of the preceding embodiments, R⁶ is halo. In some embodiments that may be combined with any of the preceding embodiments, the base-editing system further includes a pharmaceutically acceptable carrier, diluent, or excipient. In some embodiments that may be combined with any of the preceding embodiments, the compound of formula (I) is incorporated into a macromolecule. In some embodiments that may be combined with any of the preceding embodiments, the macromolecule is an oligonucleotide. In some embodiments that may be combined with any of the preceding embodiments, the npUGI is the nucleic acid inhibitor of UDG. In some embodiments that may be combined with any of the preceding embodiments, the nucleic acid inhibitor of UDG is selected from the group of a double-stranded RNA inhibitor, an antisense oligonucleotide inhibitor, a RNA/DNA hybrid inhibitor, a microRNA inhibitor, or a siRNA inhibitor. In some embodiments that may be combined with any of the preceding embodiments, the nucleic acid inhibitor reversibly inhibits an activity of an UDG. In some embodiments that may be combined with any of the preceding embodiments, the Cas domain is the Cas nickase domain or the deactivated Cas domain, the npUGI is a RNA guide of the Cas nickase domain or the deactivated Cas domain, the RNA guide includes a 5′ end and a 3′ end, and the RNA guide includes one or more deoxyuracil (dU) bases added to the 5′ end or the 3′ end. In some embodiments that may be combined with any of the preceding embodiments, the one or more dU bases are modified to resist glycosidic bond cleavage, have enhanced in vivo stability, or have enhanced ability to bind UDG, as compared to unmodified dU bases. In some embodiments that may be combined with any of the preceding embodiments, the one or more dU bases include a section of double-stranded DNA. In some embodiments that may be combined with any of the preceding embodiments, the UDG is an animal UDG. In some embodiments that may be combined with any of the preceding embodiments, the UDG is a plant UDG. In some embodiments that may be combined with any of the preceding embodiments, the plant UDG includes an amino acid sequence with at least 85% sequence identity, at least 90% sequence identity, at least 95% sequence identity, or at least 99% sequence identity to SEQ ID NO: 373, SEQ ID NO: 374, SEQ ID NO: 375, SEQ ID NO: 376, SEQ ID NO: 377, SEQ ID NO: 378, or SEQ ID NO: 379. In some embodiments that may be combined with any of the preceding embodiments, the plant UDG includes SEQ ID NO: 373, SEQ ID NO: 374, SEQ ID NO: 375, SEQ ID NO: 376, SEQ ID NO: 377, SEQ ID NO: 378, or SEQ ID NO: 379. In some embodiments that may be combined with any of the preceding embodiments, the fusion protein and the npUGI are chemically linked. In some embodiments that may be combined with any of the preceding embodiments, the fusion protein and the npUGI are not chemically linked.

[0012] In some aspects, the present disclosure relates to a base-editing system including (i) a fusion protein including (a) a Cas9 nickase domain or a dCas9 domain and (b) an APOBEC family deaminase domain; and (ii) a npUGI.

[0013] In some aspects, the present disclosure relates to a base-editing system including (i) a fusion protein including (a) a Cas12a nickase domain or a dCas12a domain and (b) an APOBEC family deaminase domain; and (ii) a npUGI.

[0014] In some aspects, the present disclosure relates to a base-editing system including (i) a fusion protein including (a) a TALE domain and (b) an APOBEC family deaminase domain; and (ii) a npUGI.

[0015] In some aspects, the present disclosure relates to a base-editing system including (i) a fusion protein including (a) a ZF domain and (b) an APOBEC family deaminase domain; and (ii) a npUGI.

[0016] In some embodiments that may be combined with any of the preceding embodiments, the npUGI is selected from the group of a small molecule inhibitor of uracil-DNA glycosylase (UDG) or a nucleic acid inhibitor of UDG. In some embodiments that may be combined with any of the preceding embodiments, the npUGI is a RNA guide of the Cas9 nickase domain, the dCas9 domain, the Cas12a nickase domain, or the dCas12a domain, wherein the RNA guide includes a 5′ end and a 3′ end, and wherein the RNA guide includes one or more deoxyuracil (dU) bases added to the 5′ end or the 3′ end.

[0017] In some aspects, the present disclosure relates to methods of editing a target nucleic acid molecule, including contacting a target nucleic acid molecule with the base-editing system of any of the preceding embodiments, wherein the DNA binding domain of the fusion protein is the Cas domain.

[0018] In some aspects, the present disclosure relates to methods of editing a target nucleic acid molecule, including contacting a target nucleic acid molecule with the base-editing system of any of the preceding embodiments, wherein the DNA binding domain of the fusion protein is the TALE domain or the ZF domain.

[0019] In some embodiments that may be combined with any of the preceding embodiments, the fusion protein and the npUGI of the base-editing system are chemically linked. In some embodiments that may be combined with any of the preceding embodiments, the fusion protein and the npUGI are chemically linked by in vitro complexing or in vivo complexing. In some embodiments that may be combined with any of the preceding embodiments, the fusion protein and the npUGI of the base-editing system are not chemically linked. In some embodiments that may be combined with any of the preceding embodiments, the fusion protein and the npUGI are co-delivered, the fusion protein is delivered before the npUGI, or the npUGI is delivered before the fusion protein. In some embodiments that may be combined with any of the preceding embodiments, the target nucleic acid sequence is a double-stranded DNA (dsDNA) sequence, and the target nucleic acid sequence is in the genome of an organism. In some embodiments that may be combined with any of the preceding embodiments, the target nucleic acid sequence is associated with a disease or disorder, and the target nucleic acid sequence includes a point mutation. In some embodiments that may be combined with any of the preceding embodiments, the point mutation is a T to C point mutation, and the T to C point mutation is associated with the disease or disorder. In some embodiments that may be combined with any of the preceding embodiments, the point mutation is a T to C point mutation in a codon of the target nucleic acid sequence, and the point mutation results in an amino acid change in a polypeptide encoded by the target nucleic acid sequence as compared to a wild-type polypeptide encoded by a wild-type nucleic acid sequence without the point mutation. In some embodiments that may be combined with any of the preceding embodiments, contacting the target nucleic acid sequence with the base-editing system produces a nucleic acid sequence that is not associated with the disease or disorder. In some embodiments that may be combined with any of the preceding embodiments, contacting the target nucleic acid sequence with the base-editing system produces a wild-type nucleic acid sequence without the point mutation. In some embodiments that may be combined with any of the preceding embodiments, the disease or disorder is cystic fibrosis, phenylketonuria, epidermolytic hyperkeratosis (EHK), Charcot-Marie-Toot disease type 4J, neuroblastoma (NB), von Willebrand disease (vWD), myotonia congenital, hereditary renal amyloidosis, dilated cardiomyopathy (DCM), hereditary lymphedema, familial Alzheimer's disease, HIV, Prion disease, chronic infantile neurologic cutaneous articular syndrome (CINCA), desmin-related myopathy (DRM), a neoplastic disease associated with a mutant PI3KCA protein, a mutant CTNNBl protein, a mutant HRAS protein, or a mutant p53 protein. In some embodiments that may be combined with any of the preceding embodiments, the contacting is performed in vivo. In some embodiments that may be combined with any of the preceding embodiments, the contacting is performed in vitro. In some embodiments that may be combined with any of the preceding embodiments, the organism is a mammal, and the mammal is selected from the group of mouse, rat, human, pig, cow, chicken, rhesus monkey, or guinea pig. In some embodiments that may be combined with any of the preceding embodiments, the target nucleic acid sequence is selected from the group of a target nucleic acid sequence associated with a disease, a target nucleic acid sequence associated with a disorder, a target nucleic acid sequence associated with metabolic function, a target nucleic acid sequence associated with reproductive function, a target nucleic acid sequence associated with disease resistance function, a target nucleic acid sequence associated with stress tolerance function, a target nucleic acid sequence associated with agronomic function, or a target nucleic acid sequence associated with nutritional function. In some embodiments that may be combined with any of the preceding embodiments, contacting the target nucleic acid sequence with the base-editing system produces a nucleic acid sequence selected from the group of a nucleic acid sequence with a corrected deleterious mutation, a nucleic acid sequence derivative, a modified nucleic acid sequence, a nucleic acid sequence with an inserted sequence, a nucleic acid sequence with improved function, or a nucleic acid sequence with altered function. In some embodiments that may be combined with any of the preceding embodiments, the target nucleic acid sequence includes a point mutation, and contacting the target nucleic acid sequence with the base-editing system produces a wild-type nucleic acid sequence without the point mutation. In some embodiments that may be combined with any of the preceding embodiments, the contacting is performed in vivo. In some embodiments that may be combined with any of the preceding embodiments, the contacting is performed in vitro. In some embodiments that may be combined with any of the preceding embodiments, the organism is a plant, and the plant is selected from the group of sorghum, corn, tomato, rice, soybean, or wheat.

[0020] In some aspects, the present disclosure relates to methods for in vivo editing of a cytosine residue of a target DNA sequence, the method including a) contacting the target DNA sequence with the base-editing system of any one of claims 2-11 and 14-41, wherein the DNA binding domain of the fusion protein is the Cas domain, and a guide nucleic acid; and b) cultivating the cell through a cell division.

[0021] In some aspects, the present disclosure relates to methods for editing a nucleobase pair of a double-stranded DNA sequence, the method including: a) contacting a target region of the double-stranded DNA sequence, wherein the target region includes a target nucleobase pair, with the base-editing system of any one of claims 2-11 and 14-41, wherein the DNA binding domain of the fusion protein is the Cas domain, and a guide nucleic acid, wherein the target region includes a target nucleobase pair; b) inducing strand separation of said target region; c) converting a first nucleobase of said target nucleobase pair in a single strand of the target region to a second nucleobase; and d) cutting no more than one strand of said target region; wherein a third nucleobase complementary to the first nucleobase base is replaced by a fourth nucleobase complementary to the second nucleobase and the method causes less than 20% indel formation in the double-stranded DNA sequence. In some embodiments that may be combined with any of the preceding embodiments, the cut single strand is hybridized to the guide nucleic acid. In some embodiments that may be combined with any of the preceding embodiments, the cut single strand is opposite to the strand including the first nucleobase. In some embodiments that may be combined with any of the preceding embodiments, the first base is a cytosine. In some embodiments that may be combined with any of the preceding embodiments, the second base is a uracil. In some embodiments that may be combined with any of the preceding embodiments, the Cas domain is selected from the group of a Cas nickase domain or a deactivated Cas domain.

[0022] In some aspects, the present disclosure relates to methods for editing a nucleobase pair of a double-stranded DNA sequence, the method including: a) contacting a target region of the double-stranded DNA sequence, wherein the target region includes a target nucleobase pair, with the base-editing system of any of claims 2-11 and 14-41, wherein the DNA binding domain of the fusion protein is the Cas domain, and a guide nucleic acid; b) inducing strand separation of said target region; c) converting a first nucleobase of said target nucleobase pair in a single strand of the target region to a second nucleobase; d) cutting no more than one strand of said target region; wherein a third nucleobase complementary to the first nucleobase base is replaced by a fourth nucleobase complementary to the second nucleobase; and e) replacing the second nucleobase with a fifth nucleobase that is complementary to the fourth nucleobase, thereby generating an intended edited basepair, wherein the efficiency of generating the intended edited basepair is at least 5%. In some embodiments that may be combined with any of the preceding embodiments, the cut single strand is hybridized to the guide nucleic acid. In some embodiments that may be combined with any of the preceding embodiments, the cut single strand is opposite to the strand including the first nucleobase. In some embodiments that may be combined with any of the preceding embodiments, the first base is a cytosine. In some embodiments that may be combined with any of the preceding embodiments, the second base is an uracil. In some embodiments that may be combined with any of the preceding embodiments, the Cas domain is selected from the group of a Cas nickase domain or a deactivated Cas domain.

[0023] In some embodiments that may be combined with any of the preceding embodiments, the Cas domain is selected from the group of a Cas 9 domain, a Cas12a domain, a Cas12h domain, a Cas12i domain, a CasX domain, a CasY domain, a C2c1 domain, a C2c2 domain, or a C2c3 domain. In some embodiments that may be combined with any of the preceding embodiments, the Cas domain is the Cas12a domain, and the Cas12a domain includes an amino acid sequence with at least 85% sequence identity, at least 90% sequence identity, at least 95% sequence identity, or at least 99% sequence identity to SEQ ID NO: 350, SEQ ID NO: 351, SEQ ID NO: 352, SEQ ID NO: 353, SEQ ID NO: 354, SEQ ID NO: 355, SEQ ID NO: 356, SEQ ID NO: 357, SEQ ID NO: 358, SEQ ID NO: 359, SEQ ID NO: 360, SEQ ID NO: 361, SEQ ID NO: 362, SEQ ID NO: 363, SEQ ID NO: 364, SEQ ID NO: 365, SEQ ID NO: 390, SEQ ID NO: 391, SEQ ID NO: 392, SEQ ID NO: 393, SEQ ID NO: 394, SEQ ID NO: 395, SEQ ID NO: 396, SEQ ID NO: 397, SEQ ID NO: 398, SEQ ID NO: 399, SEQ ID NO: 400, SEQ ID NO: 401, SEQ ID NO: 403, SEQ ID NO: 404, SEQ ID NO: 405, SEQ ID NO: 406, SEQ ID NO: 407, SEQ ID NO: 408, SEQ ID NO: 409, SEQ ID NO: 410, SEQ ID NO: 411, SEQ ID NO: 412, or SEQ ID NO: 413. In some embodiments that may be combined with any of the preceding embodiments, the Cas domain is the Cas9 domain, and the Cas9 domain includes an amino acid sequence with at least 85% sequence identity, at least 90% sequence identity, at least 95% sequence identity, or at least 99% sequence identity to SEQ ID NO: 10, SEQ ID NO: 11, SEQ ID NO: 12, SEQ ID NO: 13, SEQ ID NO: 14, SEQ ID NO: 15, SEQ ID NO: 16, SEQ ID NO: 17, SEQ ID NO: 18, SEQ ID NO: 19, SEQ ID NO: 20, SEQ ID NO: 21, SEQ ID NO: 22, SEQ ID NO: 23, SEQ ID NO: 24, SEQ ID NO: 25, SEQ ID NO: 26, SEQ ID NO: 27, SEQ ID NO: 28, SEQ ID NO: 29, SEQ ID NO: 30, SEQ ID NO: 31, SEQ ID NO: 32, SEQ ID NO: 33, SEQ ID NO: 34, SEQ ID NO: 35, SEQ ID NO: 36, SEQ ID NO: 37, SEQ ID NO: 38, SEQ ID NO: 39, SEQ ID NO: 40, SEQ ID NO: 41, SEQ ID NO: 42, SEQ ID NO: 43, SEQ ID NO: 44, SEQ ID NO: 45, SEQ ID NO: 46, SEQ ID NO: 47, SEQ ID NO: 48, SEQ ID NO: 49, SEQ ID NO: 50, SEQ ID NO: 51, SEQ ID NO: 52, SEQ ID NO: 53, SEQ ID NO: 54, SEQ ID NO: 55, SEQ ID NO: 56, SEQ ID NO: 57, SEQ ID NO: 58, SEQ ID NO: 59, SEQ ID NO: 60, SEQ ID NO: 61, SEQ ID NO: 62, SEQ ID NO: 63, SEQ ID NO: 64, SEQ ID NO: 65, SEQ ID NO: 66, SEQ ID NO: 67, SEQ ID NO: 68, SEQ ID NO: 69, SEQ ID NO: 70, SEQ ID NO: 71, SEQ ID NO: 72, SEQ ID NO: 73, SEQ ID NO: 74, SEQ ID NO: 75, SEQ ID NO: 76, SEQ ID NO: 77, SEQ ID NO: 78, SEQ ID NO: 79, SEQ ID NO: 80, SEQ ID NO: 81, SEQ ID NO: 82, SEQ ID NO: 83, SEQ ID NO: 84, SEQ ID NO: 85, SEQ ID NO: 86, SEQ ID NO: 87, SEQ ID NO: 88, SEQ ID NO: 89, SEQ ID NO: 90, SEQ ID NO: 91, SEQ ID NO: 92, SEQ ID NO: 93, SEQ ID NO: 94, SEQ ID NO: 95, SEQ ID NO: 96, SEQ ID NO: 97, SEQ ID NO: 98, SEQ ID NO: 99, SEQ ID NO: 100, SEQ ID NO: 101, SEQ ID NO: 102, SEQ ID NO: 103, SEQ ID NO: 104, SEQ ID NO: 105, SEQ ID NO: 106, SEQ ID NO: 107, SEQ ID NO: 108, SEQ ID NO: 109, SEQ ID NO: 110, SEQ ID NO: 111, SEQ ID NO: 112, SEQ ID NO: 113, SEQ ID NO: 114, SEQ ID NO: 115, SEQ ID NO: 116, SEQ ID NO: 117, SEQ ID NO: 118, SEQ ID NO: 119, SEQ ID NO: 120, SEQ ID NO: 121, SEQ ID NO: 122, SEQ ID NO: 123, SEQ ID NO: 124, SEQ ID NO: 125, SEQ ID NO: 126, SEQ ID NO: 127, SEQ ID NO: 128, SEQ ID NO: 129, SEQ ID NO: 130, SEQ ID NO: 131, SEQ ID NO: 132, SEQ ID NO: 133, SEQ ID NO: 134, SEQ ID NO: 135, SEQ ID NO: 136, SEQ ID NO: 137, SEQ ID NO: 138, SEQ ID NO: 139, SEQ ID NO: 140, SEQ ID NO: 141, SEQ ID NO: 142, SEQ ID NO: 143, SEQ ID NO: 144, SEQ ID NO: 145, SEQ ID NO: 146, SEQ ID NO: 147, SEQ ID NO: 148, SEQ ID NO: 149, SEQ ID NO: 150, SEQ ID NO: 151, SEQ ID NO: 152, SEQ ID NO: 153, SEQ ID NO: 154, SEQ ID NO: 155, SEQ ID NO: 156, SEQ ID NO: 157, SEQ ID NO: 158, SEQ ID NO: 159, SEQ ID NO: 160, SEQ ID NO: 161, SEQ ID NO: 162, SEQ ID NO: 163, SEQ ID NO: 164, SEQ ID NO: 165, SEQ ID NO: 166, SEQ ID NO: 167, SEQ ID NO: 168, SEQ ID NO: 169, SEQ ID NO: 170, SEQ ID NO: 171, SEQ ID NO: 172, SEQ ID NO: 173, SEQ ID NO: 174, SEQ ID NO: 175, SEQ ID NO: 176, SEQ ID NO: 177, SEQ ID NO: 178, SEQ ID NO: 179, SEQ ID NO: 180, SEQ ID NO: 181, SEQ ID NO: 182, SEQ ID NO: 183, SEQ ID NO: 184, SEQ ID NO: 185, SEQ ID NO: 186, SEQ ID NO: 187, SEQ ID NO: 188, SEQ ID NO: 189, SEQ ID NO: 190, SEQ ID NO: 191, SEQ ID NO: 192, SEQ ID NO: 193, SEQ ID NO: 194, SEQ ID NO: 195, SEQ ID NO: 196, SEQ ID NO: 197, SEQ ID NO: 198, SEQ ID NO: 199, SEQ ID NO: 200, SEQ ID NO: 201, SEQ ID NO: 202, SEQ ID NO: 203, SEQ ID NO: 204, SEQ ID NO: 205, SEQ ID NO: 206, SEQ ID NO: 207, SEQ ID NO: 208, SEQ ID NO: 209, SEQ ID NO: 210, SEQ ID NO: 211, SEQ ID NO: 212, SEQ ID NO: 213, SEQ ID NO: 214, SEQ ID NO: 215, SEQ ID NO: 216, SEQ ID NO: 217, SEQ ID NO: 218, SEQ ID NO: 219, SEQ ID NO: 220, SEQ ID NO: 221, SEQ ID NO: 222, SEQ ID NO: 223, SEQ ID NO: 224, SEQ ID NO: 225, SEQ ID NO: 226, SEQ ID NO: 227, SEQ ID NO: 228, SEQ ID NO: 229, SEQ ID NO: 230, SEQ ID NO: 231, SEQ ID NO: 232, SEQ ID NO: 233, SEQ ID NO: 234, SEQ ID NO: 235, SEQ ID NO: 236, SEQ ID NO: 237, SEQ ID NO: 238, SEQ ID NO: 239, SEQ ID NO: 240, SEQ ID NO: 241, SEQ ID NO: 242, SEQ ID NO: 243, SEQ ID NO: 244, SEQ ID NO: 245, SEQ ID NO: 246, SEQ ID NO: 247, SEQ ID NO: 248, SEQ ID NO: 249, SEQ ID NO: 250, SEQ ID NO: 251, SEQ ID NO: 252, SEQ ID NO: 253, SEQ ID NO: 254, SEQ ID NO: 255, SEQ ID NO: 256, SEQ ID NO: 257, SEQ ID NO: 258, SEQ ID NO: 259, SEQ ID NO: 260, SEQ ID NO: 261, SEQ ID NO: 262, SEQ ID NO: 263, SEQ ID NO: 325, SEQ ID NO: 674, SEQ ID NO: 1869, SEQ ID NO: 1870, SEQ ID NO: 1871, SEQ ID NO: 1872, SEQ ID NO: 1873, SEQ ID NO: 1874, SEQ ID NO: 1875, or SEQ ID NO: 1876.

[0024] In some aspects, the present disclosure relates to methods for in vivo editing of a cytosine residue of a target DNA sequence, the method including a) contacting the target DNA sequence with the base-editing system of any one of claims 12-41, wherein the DNA binding domain of the fusion protein is the TALE domain or the ZF domain; and b) cultivating the cell through a cell division.

[0025] In some embodiments that may be combined with any of the preceding embodiments, the cytidine deaminase domain is an APOBEC family deaminase domain. In some embodiments that may be combined with any of the preceding embodiments, the APOBEC family deaminase domain includes an amino acid sequence with at least 85% sequence identity, at least 90% sequence identity, at least 95% sequence identity, or at least 99% sequence identity to SEQ ID NO: 266, SEQ ID NO: 267, SEQ ID NO: 268, SEQ ID NO: 269, SEQ ID NO: 270, SEQ ID NO: 271, SEQ ID NO: 272, SEQ ID NO: 273, SEQ ID NO: 274, SEQ ID NO: 275, SEQ ID NO: 276, SEQ ID NO: 277, SEQ ID NO: 278, SEQ ID NO: 279, SEQ ID NO: 280, SEQ ID NO: 281, SEQ ID NO: 282, SEQ ID NO: 283, SEQ ID NO: 284, SEQ ID NO: 607, SEQ ID NO: 608, SEQ ID NO: 609, SEQ ID NO: 610, SEQ ID NO: 1878, SEQ ID NO: 1879, SEQ ID NO: 1880, SEQ ID NO: 1881, SEQ ID NO: 1882, SEQ ID NO: 1883, SEQ ID NO: 1884, SEQ ID NO: 1885, SEQ ID NO: 1886, SEQ ID NO: 1887, SEQ ID NO: 1888, SEQ ID NO: 1889, SEQ ID NO: 1890, SEQ ID NO: 1891, SEQ ID NO: 1892, SEQ ID NO: 1893, or SEQ ID NO: 1894. In some embodiments that may be combined with any of the preceding embodiments, the npUGI of the base-editing system is selected from the group of a small molecule inhibitor of uracil-DNA glycosylase (UDG) or a nucleic acid inhibitor of UDG. In some embodiments that may be combined with any of the preceding embodiments, the Cas domain is the Cas nickase domain or the deactivated Cas domain, the npUGI of the base-editing system is a RNA guide of the Cas nickase domain or the deactivated Cas domain, the RNA guide has a 5′ end and a 3′ end, and the RNA guide has one or more deoxyuracil (dU) bases added to the 5′ end or the 3′ end. In some embodiments that may be combined with any of the preceding embodiments, the fusion protein and the npUGI are chemically linked. In some embodiments that may be combined with any of the preceding embodiments, the fusion protein and the npUGI are chemically linked by in vitro complexing or in vivo complexing. In some embodiments that may be combined with any of the preceding embodiments, the fusion protein and the npUGI are not chemically linked. In some embodiments that may be combined with any of the preceding embodiments, the fusion protein and the npUGI are co-delivered, the fusion protein is delivered before the npUGI, or the npUGI is delivered before the fusion protein. In some embodiments that may be combined with any of the preceding embodiments, the DNA sequence is in the genome of an organism. In some embodiments that may be combined with any of the preceding embodiments, the organism is a mammal selected from the group of mouse, rat, human, pig, cow, chicken, rhesus monkey, or guinea pig. In some embodiments that may be combined with any of the preceding embodiments, the organism is a plant selected from the group of sorghum, corn, tomato, rice, soybean, or wheat.

[0026] The description of exemplary embodiments of the base-editing systems above is provided for illustration purposes only and not meant to be limiting. Additional base-editing systems, e.g., variations of the exemplary systems described in detail above, are also embraced by this disclosure.

[0027] The summary above is meant to illustrate, in a non-limiting manner, some of the embodiments, advantages, features, and uses of the technology disclosed herein. Other embodiments, advantages, features, and uses of the technology disclosed herein will be apparent from the Detailed Description, the Drawings, the Examples, and the Claims.

### BRIEF DESCRIPTION OF THE DRAWINGS

[0028] FIG. 1 shows a diagram of a base-editing system inhibiting DNA glycosylase excision. A dCas DNA binding domain (large light grey oval, labelled “dCas”) linked to a deaminase domain (small light grey oval, labelled “Deaminase”) is shown bound to a nucleic acid (black boxes with dashed line through middle) near a PAM sequence (box labelled “PAM”). A crRNA with a poly deoxy-uracil (“dU”) extension (black line with “dU”s at end) is complexed with the dCas DNA binding domain. The crRNA dU extension provides a secondary substrate for DNA glycosylase (grey oval, labelled “DNA Glycosylase”; dU substrate shown as white circle within grey oval), thus reducing the likelihood that the exposed edited base (half-box to the left of PAM sequence) will be bound and excised by DNA glycosylase before being encoded by mismatch repair or replication machinery.

### DETAILED DESCRIPTION

[0029] The following description sets forth exemplary methods, parameters, and the like. It should be recognized, however, that such description is not intended as a limitation on the scope of the present disclosure but is instead provided as a description of exemplary embodiments.

[0030] Some aspects of this disclosure provide a base-editing system that includes a domain capable of binding to a nucleotide sequence, for example, a DNA binding domain, (e.g., a Cas9 domain, a Cas12a domain, a Cas12h domain, a Cas12i domain, a CasX domain, a CasY domain, a C2c1 domain, a C2c2 domain, a C2c3 domain, a TALE domain, or a ZF domain), a DNA-editing domain (e.g., a deaminase domain), and a non-protein uracil-DNA glycosylase inhibitor (e.g., an organochemical compound, a nucleotide-based inhibitor, etc.). The deamination of a nucleobase by a deaminase can lead to a point mutation at the respective residue, which is referred to herein as nucleic acid editing. A base-editing system including a DNA binding domain, a DNA editing domain, and a non-protein uracil-DNA glycosylase inhibitor can thus be used for the targeted editing of nucleic acid sequences. Such base-editing systems are useful for targeted editing of DNA in vitro (e.g., for the generation of mutant cells, animals, or plants); for the introduction of targeted mutations (e.g., for the correction of genetic defects in cells ex vivo, such as in cells obtained from a subject that are subsequently re-introduced into the same or another subject); and for the introduction of targeted mutations (e.g., the correction of genetic defects or the introduction of deactivating mutations in disease-associated genes in a subject). Typically, the DNA binding domain of the base-editing systems described herein is a Cas9 domain, a Cas12a domain, a Cas12h domain, a Cas12i domain, a CasX domain, a CasY domain, a C2c1 domain, a C2c2 domain, a C2c3 domain, a TALE domain, or a ZF domain. Methods for the use of the base-editing systems as described herein are also provided.

### Base-Editing Systems

[0031] In some aspects, the present disclosure relates to a base-editing system including (i) a fusion protein including (a) a DNA-binding domain and (b) a cytidine deaminase domain; and (ii) a non-protein uracil-DNA glycosylase inhibitor (npUGI). In some embodiments that may be combined with any of the preceding embodiments, the DNA-binding domain is selected from the group of a Cas domain, a Transcription Activator-Like Effector (TALE) domain, or a Zinc finger (ZF) domain. In some embodiments that may be combined with any of the preceding embodiments, the Cas domain is selected from the group of a Cas 9 domain, a Cas12a domain, a Cas12h domain, a Cas12i domain, a CasX domain, a CasY domain, a C2c1 domain, a C2c2 domain, or a C2c3 domain. In some embodiments that may be combined with any of the preceding embodiments, the Cas domain is the Cas12a domain. In some embodiments that may be combined with any of the preceding embodiments, the Cas12a domain includes an amino acid sequence with at least 80% sequence identity, at least 82.5% sequence identity, at least 85% sequence identity, at least 87.5% sequence identity, at least 90% sequence identity, at least 91% sequence identity, at least 92% sequence identity, at least 93% sequence identity, at least 94% sequence identity, at least 95% sequence identity, at least 96% sequence identity, at least 97% sequence identity, at least 98% sequence identity, at least 99% sequence identity, at least 99.5% sequence identity, or at least 99.9% sequence identity to SEQ ID NO: 350, SEQ ID NO: 351, SEQ ID NO: 352, SEQ ID NO: 353, SEQ ID NO: 354, SEQ ID NO: 355, SEQ ID NO: 356, SEQ ID NO: 357, SEQ ID NO: 358, SEQ ID NO: 359, SEQ ID NO: 360, SEQ ID NO: 361, SEQ ID NO: 362, SEQ ID NO: 363, SEQ ID NO: 364, SEQ ID NO: 365, SEQ ID NO: 390, SEQ ID NO: 391, SEQ ID NO: 392, SEQ ID NO: 393, SEQ ID NO: 394, SEQ ID NO: 395, SEQ ID NO: 396, SEQ ID NO: 397, SEQ ID NO: 398, SEQ ID NO: 399, SEQ ID NO: 400, SEQ ID NO: 401, SEQ ID NO: 403, SEQ ID NO: 404, SEQ ID NO: 405, SEQ ID NO: 406, SEQ ID NO: 407, SEQ ID NO: 408, SEQ ID NO: 409, SEQ ID NO: 410, SEQ ID NO: 411, SEQ ID NO: 412, or SEQ ID NO: 413. In some embodiments that may be combined with any of the preceding embodiments, the Cas12a domain is SEQ ID NO: 350, SEQ ID NO: 351, SEQ ID NO: 352, SEQ ID NO: 353, SEQ ID NO: 354, SEQ ID NO: 355, SEQ ID NO: 356, SEQ ID NO: 357, SEQ ID NO: 358, SEQ ID NO: 359, SEQ ID NO: 360, SEQ ID NO: 361, SEQ ID NO: 362, SEQ ID NO: 363, SEQ ID NO: 364, SEQ ID NO: 365, SEQ ID NO: 390, SEQ ID NO: 391, SEQ ID NO: 392, SEQ ID NO: 393, SEQ ID NO: 394, SEQ ID NO: 395, SEQ ID NO: 396, SEQ ID NO: 397, SEQ ID NO: 398, SEQ ID NO: 399, SEQ ID NO: 400, SEQ ID NO: 401, SEQ ID NO: 403, SEQ ID NO: 404, SEQ ID NO: 405, SEQ ID NO: 406, SEQ ID NO: 407, SEQ ID NO: 408, SEQ ID NO: 409, SEQ ID NO: 410, SEQ ID NO: 411, SEQ ID NO: 412, or SEQ ID NO: 413. In some embodiments that may be combined with any of the preceding embodiments, the Cas domain is the Cas9 domain. In some embodiments that may be combined with any of the preceding embodiments, the Cas9 domain includes an amino acid sequence with at least 80% sequence identity, at least 82.5% sequence identity, at least 85% sequence identity, at least 87.5% sequence identity, at least 90% sequence identity, at least 91% sequence identity, at least 92% sequence identity, at least 93% sequence identity, at least 94% sequence identity, at least 95% sequence identity, at least 96% sequence identity, at least 97% sequence identity, at least 98% sequence identity, at least 99% sequence identity, at least 99.5% sequence identity, or at least 99.9% sequence identity to SEQ ID NO: 10, SEQ ID NO: 11, SEQ ID NO: 12, SEQ ID NO: 13, SEQ ID NO: 14, SEQ ID NO: 15, SEQ ID NO: 16, SEQ ID NO: 17, SEQ ID NO: 18, SEQ ID NO: 19, SEQ ID NO: 20, SEQ ID NO: 21, SEQ ID NO: 22, SEQ ID NO: 23, SEQ ID NO: 24, SEQ ID NO: 25, SEQ ID NO: 26, SEQ ID NO: 27, SEQ ID NO: 28, SEQ ID NO: 29, SEQ ID NO: 30, SEQ ID NO: 31, SEQ ID NO: 32, SEQ ID NO: 33, SEQ ID NO: 34, SEQ ID NO: 35, SEQ ID NO: 36, SEQ ID NO: 37, SEQ ID NO: 38, SEQ ID NO: 39, SEQ ID NO: 40, SEQ ID NO: 41, SEQ ID NO: 42, SEQ ID NO: 43, SEQ ID NO: 44, SEQ ID NO: 45, SEQ ID NO: 46, SEQ ID NO: 47, SEQ ID NO: 48, SEQ ID NO: 49, SEQ ID NO: 50, SEQ ID NO: 51, SEQ ID NO: 52, SEQ ID NO: 53, SEQ ID NO: 54, SEQ ID NO: 55, SEQ ID NO: 56, SEQ ID NO: 57, SEQ ID NO: 58, SEQ ID NO: 59, SEQ ID NO: 60, SEQ ID NO: 61, SEQ ID NO: 62, SEQ ID NO: 63, SEQ ID NO: 64, SEQ ID NO: 65, SEQ ID NO: 66, SEQ ID NO: 67, SEQ ID NO: 68, SEQ ID NO: 69, SEQ ID NO: 70, SEQ ID NO: 71, SEQ ID NO: 72, SEQ ID NO: 73, SEQ ID NO: 74, SEQ ID NO: 75, SEQ ID NO: 76, SEQ ID NO: 77, SEQ ID NO: 78, SEQ ID NO: 79, SEQ ID NO: 80, SEQ ID NO: 81, SEQ ID NO: 82, SEQ ID NO: 83, SEQ ID NO: 84, SEQ ID NO: 85, SEQ ID NO: 86, SEQ ID NO: 87, SEQ ID NO: 88, SEQ ID NO: 89, SEQ ID NO: 90, SEQ ID NO: 91, SEQ ID NO: 92, SEQ ID NO: 93, SEQ ID NO: 94, SEQ ID NO: 95, SEQ ID NO: 96, SEQ ID NO: 97, SEQ ID NO: 98, SEQ ID NO: 99, SEQ ID NO: 100, SEQ ID NO: 101, SEQ ID NO: 102, SEQ ID NO: 103, SEQ ID NO: 104, SEQ ID NO: 105, SEQ ID NO: 106, SEQ ID NO: 107, SEQ ID NO: 108, SEQ ID NO: 109, SEQ ID NO: 110, SEQ ID NO: 111, SEQ ID NO: 112, SEQ ID NO: 113, SEQ ID NO: 114, SEQ ID NO: 115, SEQ ID NO: 116, SEQ ID NO: 117, SEQ ID NO: 118, SEQ ID NO: 119, SEQ ID NO: 120, SEQ ID NO: 121, SEQ ID NO: 122, SEQ ID NO: 123, SEQ ID NO: 124, SEQ ID NO: 125, SEQ ID NO: 126, SEQ ID NO: 127, SEQ ID NO: 128, SEQ ID NO: 129, SEQ ID NO: 130, SEQ ID NO: 131, SEQ ID NO: 132, SEQ ID NO: 133, SEQ ID NO: 134, SEQ ID NO: 135, SEQ ID NO: 136, SEQ ID NO: 137, SEQ ID NO: 138, SEQ ID NO: 139, SEQ ID NO: 140, SEQ ID NO: 141, SEQ ID NO: 142, SEQ ID NO: 143, SEQ ID NO: 144, SEQ ID NO: 145, SEQ ID NO: 146, SEQ ID NO: 147, SEQ ID NO: 148, SEQ ID NO: 149, SEQ ID NO: 150, SEQ ID NO: 151, SEQ ID NO: 152, SEQ ID NO: 153, SEQ ID NO: 154, SEQ ID NO: 155, SEQ ID NO: 156, SEQ ID NO: 157, SEQ ID NO: 158, SEQ ID NO: 159, SEQ ID NO: 160, SEQ ID NO: 161, SEQ ID NO: 162, SEQ ID NO: 163, SEQ ID NO: 164, SEQ ID NO: 165, SEQ ID NO: 166, SEQ ID NO: 167, SEQ ID NO: 168, SEQ ID NO: 169, SEQ ID NO: 170, SEQ ID NO: 171, SEQ ID NO: 172, SEQ ID NO: 173, SEQ ID NO: 174, SEQ ID NO: 175, SEQ ID NO: 176, SEQ ID NO: 177, SEQ ID NO: 178, SEQ ID NO: 179, SEQ ID NO: 180, SEQ ID NO: 181, SEQ ID NO: 182, SEQ ID NO: 183, SEQ ID NO: 184, SEQ ID NO: 185, SEQ ID NO: 186, SEQ ID NO: 187, SEQ ID NO: 188, SEQ ID NO: 189, SEQ ID NO: 190, SEQ ID NO: 191, SEQ ID NO: 192, SEQ ID NO: 193, SEQ ID NO: 194, SEQ ID NO: 195, SEQ ID NO: 196, SEQ ID NO: 197, SEQ ID NO: 198, SEQ ID NO: 199, SEQ ID NO: 200, SEQ ID NO: 201, SEQ ID NO: 202, SEQ ID NO: 203, SEQ ID NO: 204, SEQ ID NO: 205, SEQ ID NO: 206, SEQ ID NO: 207, SEQ ID NO: 208, SEQ ID NO: 209, SEQ ID NO: 210, SEQ ID NO: 211, SEQ ID NO: 212, SEQ ID NO: 213, SEQ ID NO: 214, SEQ ID NO: 215, SEQ ID NO: 216, SEQ ID NO: 217, SEQ ID NO: 218, SEQ ID NO: 219, SEQ ID NO: 220, SEQ ID NO: 221, SEQ ID NO: 222, SEQ ID NO: 223, SEQ ID NO: 224, SEQ ID NO: 225, SEQ ID NO: 226, SEQ ID NO: 227, SEQ ID NO: 228, SEQ ID NO: 229, SEQ ID NO: 230, SEQ ID NO: 231, SEQ ID NO: 232, SEQ ID NO: 233, SEQ ID NO: 234, SEQ ID NO: 235, SEQ ID NO: 236, SEQ ID NO: 237, SEQ ID NO: 238, SEQ ID NO: 239, SEQ ID NO: 240, SEQ ID NO: 241, SEQ ID NO: 242, SEQ ID NO: 243, SEQ ID NO: 244, SEQ ID NO: 245, SEQ ID NO: 246, SEQ ID NO: 247, SEQ ID NO: 248, SEQ ID NO: 249, SEQ ID NO: 250, SEQ ID NO: 251, SEQ ID NO: 252, SEQ ID NO: 253, SEQ ID NO: 254, SEQ ID NO: 255, SEQ ID NO: 256, SEQ ID NO: 257, SEQ ID NO: 258, SEQ ID NO: 259, SEQ ID NO: 260, SEQ ID NO: 261, SEQ ID NO: 262, SEQ ID NO: 263, SEQ ID NO: 325, SEQ ID NO: 674, SEQ ID NO: 1869, SEQ ID NO: 1870, SEQ ID NO: 1871, SEQ ID NO: 1872, SEQ ID NO: 1873, SEQ ID NO: 1874, SEQ ID NO: 1875, or SEQ ID NO: 1876. In some embodiments that may be combined with any of the preceding embodiments, the Cas9 domain includes SEQ ID NO: 10, SEQ ID NO: 11, SEQ ID NO: 12, SEQ ID NO: 13, SEQ ID NO: 14, SEQ ID NO: 15, SEQ ID NO: 16, SEQ ID NO: 17, SEQ ID NO: 18, SEQ ID NO: 19, SEQ ID NO: 20, SEQ ID NO: 21, SEQ ID NO: 22, SEQ ID NO: 23, SEQ ID NO: 24, SEQ ID NO: 25, SEQ ID NO: 26, SEQ ID NO: 27, SEQ ID NO: 28, SEQ ID NO: 29, SEQ ID NO: 30, SEQ ID NO: 31, SEQ ID NO: 32, SEQ ID NO: 33, SEQ ID NO: 34, SEQ ID NO: 35, SEQ ID NO: 36, SEQ ID NO: 37, SEQ ID NO: 38, SEQ ID NO: 39, SEQ ID NO: 40, SEQ ID NO: 41, SEQ ID NO: 42, SEQ ID NO: 43, SEQ ID NO: 44, SEQ ID NO: 45, SEQ ID NO: 46, SEQ ID NO: 47, SEQ ID NO: 48, SEQ ID NO: 49, SEQ ID NO: 50, SEQ ID NO: 51, SEQ ID NO: 52, SEQ ID NO: 53, SEQ ID NO: 54, SEQ ID NO: 55, SEQ ID NO: 56, SEQ ID NO: 57, SEQ ID NO: 58, SEQ ID NO: 59, SEQ ID NO: 60, SEQ ID NO: 61, SEQ ID NO: 62, SEQ ID NO: 63, SEQ ID NO: 64, SEQ ID NO: 65, SEQ ID NO: 66, SEQ ID NO: 67, SEQ ID NO: 68, SEQ ID NO: 69, SEQ ID NO: 70, SEQ ID NO: 71, SEQ ID NO: 72, SEQ ID NO: 73, SEQ ID NO: 74, SEQ ID NO: 75, SEQ ID NO: 76, SEQ ID NO: 77, SEQ ID NO: 78, SEQ ID NO: 79, SEQ ID NO: 80, SEQ ID NO: 81, SEQ ID NO: 82, SEQ ID NO: 83, SEQ ID NO: 84, SEQ ID NO: 85, SEQ ID NO: 86, SEQ ID NO: 87, SEQ ID NO: 88, SEQ ID NO: 89, SEQ ID NO: 90, SEQ ID NO: 91, SEQ ID NO: 92, SEQ ID NO: 93, SEQ ID NO: 94, SEQ ID NO: 95, SEQ ID NO: 96, SEQ ID NO: 97, SEQ ID NO: 98, SEQ ID NO: 99, SEQ ID NO: 100, SEQ ID NO: 101, SEQ ID NO: 102, SEQ ID NO: 103, SEQ ID NO: 104, SEQ ID NO: 105, SEQ ID NO: 106, SEQ ID NO: 107, SEQ ID NO: 108, SEQ ID NO: 109, SEQ ID NO: 110, SEQ ID NO: 111, SEQ ID NO: 112, SEQ ID NO: 113, SEQ ID NO: 114, SEQ ID NO: 115, SEQ ID NO: 116, SEQ ID NO: 117, SEQ ID NO: 118, SEQ ID NO: 119, SEQ ID NO: 120, SEQ ID NO: 121, SEQ ID NO: 122, SEQ ID NO: 123, SEQ ID NO: 124, SEQ ID NO: 125, SEQ ID NO: 126, SEQ ID NO: 127, SEQ ID NO: 128, SEQ ID NO: 129, SEQ ID NO: 130, SEQ ID NO: 131, SEQ ID NO: 132, SEQ ID NO: 133, SEQ ID NO: 134, SEQ ID NO: 135, SEQ ID NO: 136, SEQ ID NO: 137, SEQ ID NO: 138, SEQ ID NO: 139, SEQ ID NO: 140, SEQ ID NO: 141, SEQ ID NO: 142, SEQ ID NO: 143, SEQ ID NO: 144, SEQ ID NO: 145, SEQ ID NO: 146, SEQ ID NO: 147, SEQ ID NO: 148, SEQ ID NO: 149, SEQ ID NO: 150, SEQ ID NO: 151, SEQ ID NO: 152, SEQ ID NO: 153, SEQ ID NO: 154, SEQ ID NO: 155, SEQ ID NO: 156, SEQ ID NO: 157, SEQ ID NO: 158, SEQ ID NO: 159, SEQ ID NO: 160, SEQ ID NO: 161, SEQ ID NO: 162, SEQ ID NO: 163, SEQ ID NO: 164, SEQ ID NO: 165, SEQ ID NO: 166, SEQ ID NO: 167, SEQ ID NO: 168, SEQ ID NO: 169, SEQ ID NO: 170, SEQ ID NO: 171, SEQ ID NO: 172, SEQ ID NO: 173, SEQ ID NO: 174, SEQ ID NO: 175, SEQ ID NO: 176, SEQ ID NO: 177, SEQ ID NO: 178, SEQ ID NO: 179, SEQ ID NO: 180, SEQ ID NO: 181, SEQ ID NO: 182, SEQ ID NO: 183, SEQ ID NO: 184, SEQ ID NO: 185, SEQ ID NO: 186, SEQ ID NO: 187, SEQ ID NO: 188, SEQ ID NO: 189, SEQ ID NO: 190, SEQ ID NO: 191, SEQ ID NO: 192, SEQ ID NO: 193, SEQ ID NO: 194, SEQ ID NO: 195, SEQ ID NO: 196, SEQ ID NO: 197, SEQ ID NO: 198, SEQ ID NO: 199, SEQ ID NO: 200, SEQ ID NO: 201, SEQ ID NO: 202, SEQ ID NO: 203, SEQ ID NO: 204, SEQ ID NO: 205, SEQ ID NO: 206, SEQ ID NO: 207, SEQ ID NO: 208, SEQ ID NO: 209, SEQ ID NO: 210, SEQ ID NO: 211, SEQ ID NO: 212, SEQ ID NO: 213, SEQ ID NO: 214, SEQ ID NO: 215, SEQ ID NO: 216, SEQ ID NO: 217, SEQ ID NO: 218, SEQ ID NO: 219, SEQ ID NO: 220, SEQ ID NO: 221, SEQ ID NO: 222, SEQ ID NO: 223, SEQ ID NO: 224, SEQ ID NO: 225, SEQ ID NO: 226, SEQ ID NO: 227, SEQ ID NO: 228, SEQ ID NO: 229, SEQ ID NO: 230, SEQ ID NO: 231, SEQ ID NO: 232, SEQ ID NO: 233, SEQ ID NO: 234, SEQ ID NO: 235, SEQ ID NO: 236, SEQ ID NO: 237, SEQ ID NO: 238, SEQ ID NO: 239, SEQ ID NO: 240, SEQ ID NO: 241, SEQ ID NO: 242, SEQ ID NO: 243, SEQ ID NO: 244, SEQ ID NO: 245, SEQ ID NO: 246, SEQ ID NO: 247, SEQ ID NO: 248, SEQ ID NO: 249, SEQ ID NO: 250, SEQ ID NO: 251, SEQ ID NO: 252, SEQ ID NO: 253, SEQ ID NO: 254, SEQ ID NO: 255, SEQ ID NO: 256, SEQ ID NO: 257, SEQ ID NO: 258, SEQ ID NO: 259, SEQ ID NO: 260, SEQ ID NO: 261, SEQ ID NO: 262, SEQ ID NO: 263, SEQ ID NO: 325, SEQ ID NO: 674, SEQ ID NO: 1869, SEQ ID NO: 1870, SEQ ID NO: 1871, SEQ ID NO: 1872, SEQ ID NO: 1873, SEQ ID NO: 1874, SEQ ID NO: 1875, or SEQ ID NO: 1876. In some embodiments that may be combined with any of the preceding embodiments, the Cas9 domain is SEQ ID NO: 674. In some embodiments that may be combined with any of the preceding embodiments, the Cas domain is the C2c1 domain, and the C2c1 domain includes an amino acid sequence with at least 80% sequence identity, at least 82.5% sequence identity, at least 85% sequence identity, at least 87.5% sequence identity, at least 90% sequence identity, at least 91% sequence identity, at least 92% sequence identity, at least 93% sequence identity, at least 94% sequence identity, at least 95% sequence identity, at least 96% sequence identity, at least 97% sequence identity, at least 98% sequence identity, at least 99% sequence identity, at least 99.5% sequence identity, or at least 99.9% sequence identity to SEQ ID NO: 367. In some embodiments that may be combined with any of the preceding embodiments, the C2c1 domain is SEQ ID NO: 367. In some embodiments that may be combined with any of the preceding embodiments, the Cas domain is the C2c2 domain, and the C2c2 domain includes an amino acid sequence with at least 80% sequence identity, at least 82.5% sequence identity, at least 85% sequence identity, at least 87.5% sequence identity, at least 90% sequence identity, at least 91% sequence identity, at least 92% sequence identity, at least 93% sequence identity, at least 94% sequence identity, at least 95% sequence identity, at least 96% sequence identity, at least 97% sequence identity, at least 98% sequence identity, at least 99% sequence identity, at least 99.5% sequence identity, or at least 99.9% sequence identity to SEQ ID NO: 368. In some embodiments that may be combined with any of the preceding embodiments, the C2c2 domain is SEQ ID NO: 368. In some embodiments that may be combined with any of the preceding embodiments, the Cas domain is the C2c3 domain, and the C2c3 domain includes an amino acid sequence with at least 80% sequence identity, at least 82.5% sequence identity, at least 85% sequence identity, at least 87.5% sequence identity, at least 90% sequence identity, at least 91% sequence identity, at least 92% sequence identity, at least 93% sequence identity, at least 94% sequence identity, at least 95% sequence identity, at least 96% sequence identity, at least 97% sequence identity, at least 98% sequence identity, at least 99% sequence identity, at least 99.5% sequence identity, or at least 99.9% sequence identity to SEQ ID NO: 369. In some embodiments that may be combined with any of the preceding embodiments, the C2c3 domain is SEQ ID NO: 369. In some embodiments that may be combined with any of the preceding embodiments, the Cas domain is the CasX domain, and the CasX domain includes an amino acid sequence with at least 80% sequence identity, at least 82.5% sequence identity, at least 85% sequence identity, at least 87.5% sequence identity, at least 90% sequence identity, at least 91% sequence identity, at least 92% sequence identity, at least 93% sequence identity, at least 94% sequence identity, at least 95% sequence identity, at least 96% sequence identity, at least 97% sequence identity, at least 98% sequence identity, at least 99% sequence identity, at least 99.5% sequence identity, or at least 99.9% sequence identity to SEQ ID NO: 370 or SEQ ID NO: 371. In some embodiments that may be combined with any of the preceding embodiments, the CasX domain is SEQ ID NO: 370 or SEQ ID NO: 371. In some embodiments that may be combined with any of the preceding embodiments, the Cas domain is the CasY domain, and the CasY domain includes an amino acid sequence with at least 80% sequence identity, at least 82.5% sequence identity, at least 85% sequence identity, at least 87.5% sequence identity, at least 90% sequence identity, at least 91% sequence identity, at least 92% sequence identity, at least 93% sequence identity, at least 94% sequence identity, at least 95% sequence identity, at least 96% sequence identity, at least 97% sequence identity, at least 98% sequence identity, at least 99% sequence identity, at least 99.5% sequence identity, or at least 99.9% sequence identity to SEQ ID NO: 372. In some embodiments that may be combined with any of the preceding embodiments, the CasY domain is SEQ ID NO: 372. In some embodiments that may be combined with any of the preceding embodiments, the DNA-binding domain is selected from the group of an Argonaute domain or a meganuclease domain. In some embodiments that may be combined with any of the preceding embodiments, the DNA-binding domain is an Argonaute domain, and the Argonaute domain includes an amino acid sequence with at least 80% sequence identity, at least 82.5% sequence identity, at least 85% sequence identity, at least 87.5% sequence identity, at least 90% sequence identity, at least 91% sequence identity, at least 92% sequence identity, at least 93% sequence identity, at least 94% sequence identity, at least 95% sequence identity, at least 96% sequence identity, at least 97% sequence identity, at least 98% sequence identity, at least 99% sequence identity, at least 99.5% sequence identity, or at least 99.9% sequence identity to SEQ ID NO: 366. In some embodiments that may be combined with any of the preceding embodiments, the Argonaute domain is SEQ ID NO: 366. In some embodiments that may be combined with any of the preceding embodiments, the Cas domain is selected from the group of a Cas nickase domain or a deactivated Cas domain. In some embodiments that may be combined with any of the preceding embodiments, the base-editing system further includes a guide RNA, the guide RNA has a length in the range of 15-100 nucleotides, and the guide RNA includes a sequence of at least 10 contiguous nucleotides that is complementary to a target sequence. In some embodiments that may be combined with any of the preceding embodiments, the DNA-binding domain is the TALE domain. In some embodiments that may be combined with any of the preceding embodiments, the DNA-binding domain is the ZF domain.

[0032] In some embodiments that may be combined with any of the preceding embodiments, the cytidine deaminase domain is an apolipoprotein B mRNA-editing complex (APOBEC) family deaminase domain. In some embodiments that may be combined with any of the preceding embodiments, the APOBEC family deaminase domain is selected from the group of an APOBEC1 deaminase domain, an APOBEC2 deaminase domain, an APOBEC3A deaminase domain, an APOBEC3B deaminase domain, an APOBEC3C deaminase domain, an APOBEC3D deaminase domain, an APOBEC3F deaminase domain, an APOBEC3G deaminase domain, an APOBEC3H deaminase domain, or an APOBEC4 deaminase domain. In some embodiments that may be combined with any of the preceding embodiments, the APOBEC family deaminase domain includes an amino acid sequence with at least 80% sequence identity, at least 82.5% sequence identity, at least 85% sequence identity, at least 87.5% sequence identity, at least 90% sequence identity, at least 91% sequence identity, at least 92% sequence identity, at least 93% sequence identity, at least 94% sequence identity, at least 95% sequence identity, at least 96% sequence identity, at least 97% sequence identity, at least 98% sequence identity, at least 99% sequence identity, at least 99.5% sequence identity, or at least 99.9% sequence identity to SEQ ID NO: 266, SEQ ID NO: 267, SEQ ID NO: 268, SEQ ID NO: 269, SEQ ID NO: 270, SEQ ID NO: 271, SEQ ID NO: 272, SEQ ID NO: 273, SEQ ID NO: 274, SEQ ID NO: 275, SEQ ID NO: 276, SEQ ID NO: 277, SEQ ID NO: 278, SEQ ID NO: 279, SEQ ID NO: 280, SEQ ID NO: 281, SEQ ID NO: 282, SEQ ID NO: 283, SEQ ID NO: 284, SEQ ID NO: 607, SEQ ID NO: 608, SEQ ID NO: 609, SEQ ID NO: 610, SEQ ID NO: 1878, SEQ ID NO: 1879, SEQ ID NO: 1880, SEQ ID NO: 1881, SEQ ID NO: 1882, SEQ ID NO: 1883, SEQ ID NO: 1884, SEQ ID NO: 1885, SEQ ID NO: 1886, SEQ ID NO: 1887, SEQ ID NO: 1888, SEQ ID NO: 1889, SEQ ID NO: 1890, SEQ ID NO: 1891, SEQ ID NO: 1892, SEQ ID NO: 1893, or SEQ ID NO: 1894. In some embodiments that may be combined with any of the preceding embodiments, the APOBEC family deaminase domain includes SEQ ID NO: 266, SEQ ID NO: 267, SEQ ID NO: 268, SEQ ID NO: 269, SEQ ID NO: 270, SEQ ID NO: 271, SEQ ID NO: 272, SEQ ID NO: 273, SEQ ID NO: 274, SEQ ID NO: 275, SEQ ID NO: 276, SEQ ID NO: 277, SEQ ID NO: 278, SEQ ID NO: 279, SEQ ID NO: 280, SEQ ID NO: 281, SEQ ID NO: 282, SEQ ID NO: 283, SEQ ID NO: 284, SEQ ID NO: 607, SEQ ID NO: 608, SEQ ID NO: 609, SEQ ID NO: 610, SEQ ID NO: 1878, SEQ ID NO: 1879, SEQ ID NO: 1880, SEQ ID NO: 1881, SEQ ID NO: 1882, SEQ ID NO: 1883, SEQ ID NO: 1884, SEQ ID NO: 1885, SEQ ID NO: 1886, SEQ ID NO: 1887, SEQ ID NO: 1888, SEQ ID NO: 1889, SEQ ID NO: 1890, SEQ ID NO: 1891, SEQ ID NO: 1892, SEQ ID NO: 1893, or SEQ ID NO: 1894. In some embodiments that may be combined with any of the preceding embodiments, the APOBEC family deaminase domain is an activation-induced deaminase (AID) domain. In some embodiments that may be combined with any of the preceding embodiments, the AID deaminase domain includes an amino acid sequence with at least 80% sequence identity, at least 82.5% sequence identity, at least 85% sequence identity, at least 87.5% sequence identity, at least 90% sequence identity, at least 91% sequence identity, at least 92% sequence identity, at least 93% sequence identity, at least 94% sequence identity, at least 95% sequence identity, at least 96% sequence identity, at least 97% sequence identity, at least 98% sequence identity, at least 99% sequence identity, at least 99.5% sequence identity, or at least 99.9% sequence identity to SEQ ID NO: 266, SEQ ID NO: 267, SEQ ID NO: 268, SEQ ID NO: 269, SEQ ID NO: 607, SEQ ID NO: 608, or SEQ ID NO: 1879. In some embodiments that may be combined with any of the preceding embodiments, the AID deaminase domain is SEQ ID NO: 266, SEQ ID NO: 267, SEQ ID NO: 268, SEQ ID NO: 269, SEQ ID NO: 607, SEQ ID NO: 608, or SEQ ID NO: 1879.

[0033] In some embodiments that may be combined with any of the preceding embodiments, the npUGI is selected from the group of a small molecule inhibitor of uracil-DNA glycosylase (UDG) or a nucleic acid inhibitor of UDG. In some embodiments that may be combined with any of the preceding embodiments, the npUGI is the small molecule inhibitor of UDG. In some embodiments that may be combined with any of the preceding embodiments, the small molecule inhibitor of UDG is a compound of formula (I):

[chemical structure]

or a pharmaceutically acceptable salt thereof, wherein: R¹ is H, a furanose carbohydrate, a pyranose carbohydrate, a carbohydrate mimetic, C₁₋₁₆alkyl, C₁₋₁₆alkenyl, C₁₋₁₆alkynyl, C₁₋₁₆alkoxy, or C₆₋₂₀aryl, wherein the furanose carbohydrate, or a derivative thereof, pyranose carbohydrate, or a derivative thereof, carbohydrate mimetic, C₁₋₁₆alkyl, C₁₋₁₆alkenyl, C₁₋₁₆alkynyl, C₁₋₁₆alkoxy, or C₆₋₂₀aryl is independently optionally substituted with one or more substituents selected from the group of hydroxyl, halo, cyano, NO₂, N(R⁴)(R⁵), C₁₋₁₆alkoxy, or C₆₋₂₀aryl, wherein the C₆₋₂₀aryl is further optionally substituted with one or more substituents selected from the group of C₁₋₁₆alkyl, C₁₋₁₆alkenyl, C₁₋₁₆alkynyl, C₁₋₁₆alkoxy, hydroxyl, halo, cyano, NO₂, or N(R⁴)(R⁵); L is O, S, or *—N(R³)—**, wherein R³ is H or C₁₋₁₆alkyl, and ** indicates the point of attachment to the R² moiety and * indicates the point of attachment to the remainder of the molecule; R² is H, N(R⁴)(R⁵), or C₆₋₂₀aryl, wherein the C₆₋₂₀aryl is independently substituted with one or more substituents selected from the group of C₁₋₁₆alkyl, C₁₋₁₆alkenyl, C₁₋₁₆alkynyl, or C₁₋₁₆alkoxy; R⁴ and R⁵ are each independently H or C₆₋₂₀aryl; and R⁶ is H or halo. In some embodiments that may be combined with any of the preceding embodiments, R¹ is H. In some embodiments that may be combined with any of the preceding embodiments, R¹ is C₁₋₁₆alkyl, wherein the C₁₋₁₆alkyl is optionally substituted with one or more substituents selected from the group of hydroxyl, halo, cyano, NO₂, N(R⁴)(R⁵), C₁₋₁₆alkoxy, or C₆₋₂₀aryl, wherein the C₆₋₂₀aryl is further optionally substituted with one or more substituents selected from the group of C₁₋₁₆alkyl, C₁₋₁₆alkenyl, C₁₋₁₆alkynyl, C₁₋₁₆alkoxy, hydroxyl, halo, cyano, NO₂, or N(R⁴)(R⁵), wherein R₄ and R₅ are each independently H or C₆₋₂₀aryl. In some embodiments that may be combined with any of the preceding embodiments, L is NR³, wherein R³ is H. In some embodiments that may be combined with any of the preceding embodiments, L is O. In some embodiments that may be combined with any of the preceding embodiments, R² is C₆₋₂₀aryl, wherein the C₆₋₂₀aryl is independently substituted with one or more substituents selected from the group of C₁₋₁₆alkyl, C₁₋₁₆alkenyl, C₁₋₁₆alkynyl, or C₁₋₁₆alkoxy. In some embodiments that may be combined with any of the preceding embodiments, R⁶ is H. In some embodiments that may be combined with any of the preceding embodiments, R⁶ is halo. In some embodiments that may be combined with any of the preceding embodiments, the base-editing system further includes a pharmaceutically acceptable carrier, diluent, or excipient. In some embodiments that may be combined with any of the preceding embodiments, the compound of formula (I) is incorporated into a macromolecule. In some embodiments that may be combined with any of the preceding embodiments, the macromolecule is an oligonucleotide. In some embodiments that may be combined with any of the preceding embodiments, the npUGI is the nucleic acid inhibitor of UDG. In some embodiments that may be combined with any of the preceding embodiments, the nucleic acid inhibitor of UDG is selected from the group of a double-stranded RNA inhibitor, an antisense oligonucleotide inhibitor, a RNA/DNA hybrid inhibitor, a microRNA inhibitor, or a siRNA inhibitor. In some embodiments that may be combined with any of the preceding embodiments. In some embodiments that may be combined with any of the preceding embodiments, the Cas domain is the Cas nickase domain or the deactivated Cas domain, the npUGI is a RNA guide of the Cas nickase domain or the deactivated Cas domain, the RNA guide includes a 5′ end and a 3′ end, and the RNA guide includes one or more deoxyuracil (dU) bases added to the 5′ end or the 3′ end. In some embodiments that may be combined with any of the preceding embodiments, the one or more dU bases are modified to resist glycosidic bond cleavage, have enhanced in vivo stability, or have enhanced ability to bind UDG, as compared to unmodified dU bases. In some embodiments that may be combined with any of the preceding embodiments, the one or more dU bases include a section of double-stranded DNA. In some embodiments that may be combined with any of the preceding embodiments, the section of double-stranded DNA includes one or more U:T pairs, U:G pairs, U: A pairs, U: C pairs, dU:T pairs, dU:G pairs, dU: A pairs, dU: T pairs, or any combination thereof (e.g., any combination of U or dU base mismatch pairs). In some embodiments that may be combined with any of the preceding embodiments, the UDG is an animal UDG. In some embodiments that may be combined with any of the preceding embodiments, the UDG is a plant UDG. In some embodiments that may be combined with any of the preceding embodiments, the plant UDG includes an amino acid sequence with at least 80% sequence identity, at least 82.5% sequence identity, at least 85% sequence identity, at least 87.5% sequence identity, at least 90% sequence identity, at least 91% sequence identity, at least 92% sequence identity, at least 93% sequence identity, at least 94% sequence identity, at least 95% sequence identity, at least 96% sequence identity, at least 97% sequence identity, at least 98% sequence identity, at least 99% sequence identity, at least 99.5% sequence identity, or at least 99.9% sequence identity to SEQ ID NO: 373, SEQ ID NO: 374, SEQ ID NO: 375, SEQ ID NO: 376, SEQ ID NO: 377, SEQ ID NO: 378, or SEQ ID NO: 379. In some embodiments that may be combined with any of the preceding embodiments, the plant UDG includes SEQ ID NO: 373, SEQ ID NO: 374, SEQ ID NO: 375, SEQ ID NO: 376, SEQ ID NO: 377, SEQ ID NO: 378, or SEQ ID NO: 379. In some embodiments that may be combined with any of the preceding embodiments, the fusion protein and the npUGI are chemically linked. In some embodiments that may be combined with any of the preceding embodiments, the fusion protein and the npUGI are not chemically linked.

[0034] In some aspects, the present disclosure relates to a base-editing system including (i) a fusion protein including (a)) a Cas9 nickase domain or a dCas9 domain and (b) an APOBEC family deaminase domain; and (ii) a npUGI. In some embodiments that may be combined with any of the preceding embodiments, the APOBEC family deaminase domain is selected from the group of an APOBEC1 deaminase domain, an APOBEC2 deaminase domain, an APOBEC3A deaminase domain, an APOBEC3B deaminase domain, an APOBEC3C deaminase domain, an APOBEC3D deaminase domain, an APOBEC3F deaminase domain, an APOBEC3G deaminase domain, an APOBEC3H deaminase domain, or an APOBEC4 deaminase domain. In some embodiments that may be combined with any of the preceding embodiments, the APOBEC family deaminase domain includes an amino acid sequence with at least 80% sequence identity, at least 82.5% sequence identity, at least 85% sequence identity, at least 87.5% sequence identity, at least 90% sequence identity, at least 91% sequence identity, at least 92% sequence identity, at least 93% sequence identity, at least 94% sequence identity, at least 95% sequence identity, at least 96% sequence identity, at least 97% sequence identity, at least 98% sequence identity, at least 99% sequence identity, at least 99.5% sequence identity, or at least 99.9% sequence identity to SEQ ID NO: 266, SEQ ID NO: 267, SEQ ID NO: 268, SEQ ID NO: 269, SEQ ID NO: 270, SEQ ID NO: 271, SEQ ID NO: 272, SEQ ID NO: 273, SEQ ID NO: 274, SEQ ID NO: 275, SEQ ID NO: 276, SEQ ID NO: 277, SEQ ID NO: 278, SEQ ID NO: 279, SEQ ID NO: 280, SEQ ID NO: 281, SEQ ID NO: 282, SEQ ID NO: 283, SEQ ID NO: 284, SEQ ID NO: 607, SEQ ID NO: 608, SEQ ID NO: 609, SEQ ID NO: 610, SEQ ID NO: 1878, SEQ ID NO: 1879, SEQ ID NO: 1880, SEQ ID NO: 1881, SEQ ID NO: 1882, SEQ ID NO: 1883, SEQ ID NO: 1884, SEQ ID NO: 1885, SEQ ID NO: 1886, SEQ ID NO: 1887, SEQ ID NO: 1888, SEQ ID NO: 1889, SEQ ID NO: 1890, SEQ ID NO: 1891, SEQ ID NO: 1892, SEQ ID NO: 1893, or SEQ ID NO: 1894. In some embodiments that may be combined with any of the preceding embodiments, the APOBEC family deaminase domain includes SEQ ID NO: 266, SEQ ID NO: 267, SEQ ID NO: 268, SEQ ID NO: 269, SEQ ID NO: 270, SEQ ID NO: 271, SEQ ID NO: 272, SEQ ID NO: 273, SEQ ID NO: 274, SEQ ID NO: 275, SEQ ID NO: 276, SEQ ID NO: 277, SEQ ID NO: 278, SEQ ID NO: 279, SEQ ID NO: 280, SEQ ID NO: 281, SEQ ID NO: 282, SEQ ID NO: 283, SEQ ID NO: 284, SEQ ID NO: 607, SEQ ID NO: 608, SEQ ID NO: 609, SEQ ID NO: 610, SEQ ID NO: 1878, SEQ ID NO: 1879, SEQ ID NO: 1880, SEQ ID NO: 1881, SEQ ID NO: 1882, SEQ ID NO: 1883, SEQ ID NO: 1884, SEQ ID NO: 1885, SEQ ID NO: 1886, SEQ ID NO: 1887, SEQ ID NO: 1888, SEQ ID NO: 1889, SEQ ID NO: 1890, SEQ ID NO: 1891, SEQ ID NO: 1892, SEQ ID NO: 1893, or SEQ ID NO: 1894. In some embodiments that may be combined with any of the preceding embodiments, the APOBEC family deaminase domain is an AID deaminase domain, and the AID deaminase domain includes an amino acid sequence with at least 80% sequence identity, at least 82.5% sequence identity, at least 85% sequence identity, at least 87.5% sequence identity, at least 90% sequence identity, at least 91% sequence identity, at least 92% sequence identity, at least 93% sequence identity, at least 94% sequence identity, at least 95% sequence identity, at least 96% sequence identity, at least 97% sequence identity, at least 98% sequence identity, at least 99% sequence identity, at least 99.5% sequence identity, or at least 99.9% sequence identity to SEQ ID NO: 266, SEQ ID NO: 267, SEQ ID NO: 268, SEQ ID NO: 269, SEQ ID NO: 607, SEQ ID NO: 608, or SEQ ID NO: 1879. In some embodiments that may be combined with any of the preceding embodiments, the AID deaminase domain is SEQ ID NO: 266, SEQ ID NO: 267, SEQ ID NO: 268, SEQ ID NO: 269, SEQ ID NO: 607, SEQ ID NO: 608, or SEQ ID NO: 1879.

[0035] In some aspects, the present disclosure relates to a base-editing system including (i) a fusion protein including (a) a Cas12a nickase domain or a dCas12a domain and (b) an APOBEC family deaminase domain; and (ii) a npUGI. In some embodiments that may be combined with any of the preceding embodiments, the APOBEC family deaminase domain is selected from the group of an APOBEC1 deaminase domain, an APOBEC2 deaminase domain, an APOBEC3A deaminase domain, an APOBEC3B deaminase domain, an APOBEC3C deaminase domain, an APOBEC3D deaminase domain, an APOBEC3F deaminase domain, an APOBEC3G deaminase domain, an APOBEC3H deaminase domain, or an APOBEC4 deaminase domain. In some embodiments that may be combined with any of the preceding embodiments, the APOBEC family deaminase domain includes an amino acid sequence with at least 80% sequence identity, at least 82.5% sequence identity, at least 85% sequence identity, at least 87.5% sequence identity, at least 90% sequence identity, at least 91% sequence identity, at least 92% sequence identity, at least 93% sequence identity, at least 94% sequence identity, at least 95% sequence identity, at least 96% sequence identity, at least 97% sequence identity, at least 98% sequence identity, at least 99% sequence identity, at least 99.5% sequence identity, or at least 99.9% sequence identity to SEQ ID NO: 266, SEQ ID NO: 267, SEQ ID NO: 268, SEQ ID NO: 269, SEQ ID NO: 270, SEQ ID NO: 271, SEQ ID NO: 272, SEQ ID NO: 273, SEQ ID NO: 274, SEQ ID NO: 275, SEQ ID NO: 276, SEQ ID NO: 277, SEQ ID NO: 278, SEQ ID NO: 279, SEQ ID NO: 280, SEQ ID NO: 281, SEQ ID NO: 282, SEQ ID NO: 283, SEQ ID NO: 284, SEQ ID NO: 607, SEQ ID NO: 608, SEQ ID NO: 609, SEQ ID NO: 610, SEQ ID NO: 1878, SEQ ID NO: 1879, SEQ ID NO: 1880, SEQ ID NO: 1881, SEQ ID NO: 1882, SEQ ID NO: 1883, SEQ ID NO: 1884, SEQ ID NO: 1885, SEQ ID NO: 1886, SEQ ID NO: 1887, SEQ ID NO: 1888, SEQ ID NO: 1889, SEQ ID NO: 1890, SEQ ID NO: 1891, SEQ ID NO: 1892, SEQ ID NO: 1893, or SEQ ID NO: 1894. In some embodiments that may be combined with any of the preceding embodiments, the APOBEC family deaminase domain includes SEQ ID NO: 266, SEQ ID NO: 267, SEQ ID NO: 268, SEQ ID NO: 269, SEQ ID NO: 270, SEQ ID NO: 271, SEQ ID NO: 272, SEQ ID NO: 273, SEQ ID NO: 274, SEQ ID NO: 275, SEQ ID NO: 276, SEQ ID NO: 277, SEQ ID NO: 278, SEQ ID NO: 279, SEQ ID NO: 280, SEQ ID NO: 281, SEQ ID NO: 282, SEQ ID NO: 283, SEQ ID NO: 284, SEQ ID NO: 607, SEQ ID NO: 608, SEQ ID NO: 609, SEQ ID NO: 610, SEQ ID NO: 1878, SEQ ID NO: 1879, SEQ ID NO: 1880, SEQ ID NO: 1881, SEQ ID NO: 1882, SEQ ID NO: 1883, SEQ ID NO: 1884, SEQ ID NO: 1885, SEQ ID NO: 1886, SEQ ID NO: 1887, SEQ ID NO: 1888, SEQ ID NO: 1889, SEQ ID NO: 1890, SEQ ID NO: 1891, SEQ ID NO: 1892, SEQ ID NO: 1893, or SEQ ID NO: 1894. In some embodiments that may be combined with any of the preceding embodiments, the APOBEC family deaminase domain is an AID deaminase domain, and the AID deaminase domain includes an amino acid sequence with at least 80% sequence identity, at least 82.5% sequence identity, at least 85% sequence identity, at least 87.5% sequence identity, at least 90% sequence identity, at least 91% sequence identity, at least 92% sequence identity, at least 93% sequence identity, at least 94% sequence identity, at least 95% sequence identity, at least 96% sequence identity, at least 97% sequence identity, at least 98% sequence identity, at least 99% sequence identity, at least 99.5% sequence identity, or at least 99.9% sequence identity to SEQ ID NO: 266, SEQ ID NO: 267, SEQ ID NO: 268, SEQ ID NO: 269, SEQ ID NO: 607, SEQ ID NO: 608, or SEQ ID NO: 1879. In some embodiments that may be combined with any of the preceding embodiments, the AID deaminase domain is SEQ ID NO: 266, SEQ ID NO: 267, SEQ ID NO: 268, SEQ ID NO: 269, SEQ ID NO: 607, SEQ ID NO: 608, or SEQ ID NO: 1879.

[0036] In some aspects, the present disclosure relates to a base-editing system including (i) a fusion protein including (a) a TALE domain and (b) an APOBEC family deaminase domain; and (ii) a npUGI. In some embodiments that may be combined with any of the preceding embodiments, the APOBEC family deaminase domain is selected from the group of an APOBEC1 deaminase domain, an APOBEC2 deaminase domain, an APOBEC3A deaminase domain, an APOBEC3B deaminase domain, an APOBEC3C deaminase domain, an APOBEC3D deaminase domain, an APOBEC3F deaminase domain, an APOBEC3G deaminase domain, an APOBEC3H deaminase domain, or an APOBEC4 deaminase domain. In some embodiments that may be combined with any of the preceding embodiments, the APOBEC family deaminase domain includes an amino acid sequence with at least 80% sequence identity, at least 82.5% sequence identity, at least 85% sequence identity, at least 87.5% sequence identity, at least 90% sequence identity, at least 91% sequence identity, at least 92% sequence identity, at least 93% sequence identity, at least 94% sequence identity, at least 95% sequence identity, at least 96% sequence identity, at least 97% sequence identity, at least 98% sequence identity, at least 99% sequence identity, at least 99.5% sequence identity, or at least 99.9% sequence identity to SEQ ID NO: 266, SEQ ID NO: 267, SEQ ID NO: 268, SEQ ID NO: 269, SEQ ID NO: 270, SEQ ID NO: 271, SEQ ID NO: 272, SEQ ID NO: 273, SEQ ID NO: 274, SEQ ID NO: 275, SEQ ID NO: 276, SEQ ID NO: 277, SEQ ID NO: 278, SEQ ID NO: 279, SEQ ID NO: 280, SEQ ID NO: 281, SEQ ID NO: 282, SEQ ID NO: 283, SEQ ID NO: 284, SEQ ID NO: 607, SEQ ID NO: 608, SEQ ID NO: 609, SEQ ID NO: 610, SEQ ID NO: 1878, SEQ ID NO: 1879, SEQ ID NO: 1880, SEQ ID NO: 1881, SEQ ID NO: 1882, SEQ ID NO: 1883, SEQ ID NO: 1884, SEQ ID NO: 1885, SEQ ID NO: 1886, SEQ ID NO: 1887, SEQ ID NO: 1888, SEQ ID NO: 1889, SEQ ID NO: 1890, SEQ ID NO: 1891, SEQ ID NO: 1892, SEQ ID NO: 1893, or SEQ ID NO: 1894. In some embodiments that may be combined with any of the preceding embodiments, the APOBEC family deaminase domain includes SEQ ID NO: 266, SEQ ID NO: 267, SEQ ID NO: 268, SEQ ID NO: 269, SEQ ID NO: 270, SEQ ID NO: 271, SEQ ID NO: 272, SEQ ID NO: 273, SEQ ID NO: 274, SEQ ID NO: 275, SEQ ID NO: 276, SEQ ID NO: 277, SEQ ID NO: 278, SEQ ID NO: 279, SEQ ID NO: 280, SEQ ID NO: 281, SEQ ID NO: 282, SEQ ID NO: 283, SEQ ID NO: 284, SEQ ID NO: 607, SEQ ID NO: 608, SEQ ID NO: 609, SEQ ID NO: 610, SEQ ID NO: 1878, SEQ ID NO: 1879, SEQ ID NO: 1880, SEQ ID NO: 1881, SEQ ID NO: 1882, SEQ ID NO: 1883, SEQ ID NO: 1884, SEQ ID NO: 1885, SEQ ID NO: 1886, SEQ ID NO: 1887, SEQ ID NO: 1888, SEQ ID NO: 1889, SEQ ID NO: 1890, SEQ ID NO: 1891, SEQ ID NO: 1892, SEQ ID NO: 1893, or SEQ ID NO: 1894. In some embodiments that may be combined with any of the preceding embodiments, the APOBEC family deaminase domain is an AID deaminase domain, and the AID deaminase domain includes an amino acid sequence with at least 80% sequence identity, at least 82.5% sequence identity, at least 85% sequence identity, at least 87.5% sequence identity, at least 90% sequence identity, at least 91% sequence identity, at least 92% sequence identity, at least 93% sequence identity, at least 94% sequence identity, at least 95% sequence identity, at least 96% sequence identity, at least 97% sequence identity, at least 98% sequence identity, at least 99% sequence identity, at least 99.5% sequence identity, or at least 99.9% sequence identity to SEQ ID NO: 266, SEQ ID NO: 267, SEQ ID NO: 268, SEQ ID NO: 269, SEQ ID NO: 607, SEQ ID NO: 608, or SEQ ID NO: 1879. In some embodiments that may be combined with any of the preceding embodiments, the AID deaminase domain is SEQ ID NO: 266, SEQ ID NO: 267, SEQ ID NO: 268, SEQ ID NO: 269, SEQ ID NO: 607, SEQ ID NO: 608, or SEQ ID NO: 1879.

[0037] In some aspects, the present disclosure relates to a base-editing system including (i) a fusion protein including (a) a ZF domain and (b) an APOBEC family deaminase domain; and (ii) a npUGI. In some embodiments that may be combined with any of the preceding embodiments, the APOBEC family deaminase domain is selected from the group of an APOBEC1 deaminase domain, an APOBEC2 deaminase domain, an APOBEC3A deaminase domain, an APOBEC3B deaminase domain, an APOBEC3C deaminase domain, an APOBEC3D deaminase domain, an APOBEC3F deaminase domain, an APOBEC3G deaminase domain, an APOBEC3H deaminase domain, or an APOBEC4 deaminase domain. In some embodiments that may be combined with any of the preceding embodiments, the APOBEC family deaminase domain includes an amino acid sequence with at least 80% sequence identity, at least 82.5% sequence identity, at least 85% sequence identity, at least 87.5% sequence identity, at least 90% sequence identity, at least 91% sequence identity, at least 92% sequence identity, at least 93% sequence identity, at least 94% sequence identity, at least 95% sequence identity, at least 96% sequence identity, at least 97% sequence identity, at least 98% sequence identity, at least 99% sequence identity, at least 99.5% sequence identity, or at least 99.9% sequence identity to SEQ ID NO: 266, SEQ ID NO: 267, SEQ ID NO: 268, SEQ ID NO: 269, SEQ ID NO: 270, SEQ ID NO: 271, SEQ ID NO: 272, SEQ ID NO: 273, SEQ ID NO: 274, SEQ ID NO: 275, SEQ ID NO: 276, SEQ ID NO: 277, SEQ ID NO: 278, SEQ ID NO: 279, SEQ ID NO: 280, SEQ ID NO: 281, SEQ ID NO: 282, SEQ ID NO: 283, SEQ ID NO: 284, SEQ ID NO: 607, SEQ ID NO: 608, SEQ ID NO: 609, SEQ ID NO: 610, SEQ ID NO: 1878, SEQ ID NO: 1879, SEQ ID NO: 1880, SEQ ID NO: 1881, SEQ ID NO: 1882, SEQ ID NO: 1883, SEQ ID NO: 1884, SEQ ID NO: 1885, SEQ ID NO: 1886, SEQ ID NO: 1887, SEQ ID NO: 1888, SEQ ID NO: 1889, SEQ ID NO: 1890, SEQ ID NO: 1891, SEQ ID NO: 1892, SEQ ID NO: 1893, or SEQ ID NO: 1894. In some embodiments that may be combined with any of the preceding embodiments, the APOBEC family deaminase domain includes SEQ ID NO: 266, SEQ ID NO: 267, SEQ ID NO: 268, SEQ ID NO: 269, SEQ ID NO: 270, SEQ ID NO: 271, SEQ ID NO: 272, SEQ ID NO: 273, SEQ ID NO: 274, SEQ ID NO: 275, SEQ ID NO: 276, SEQ ID NO: 277, SEQ ID NO: 278, SEQ ID NO: 279, SEQ ID NO: 280, SEQ ID NO: 281, SEQ ID NO: 282, SEQ ID NO: 283, SEQ ID NO: 284, SEQ ID NO: 607, SEQ ID NO: 608, SEQ ID NO: 609, SEQ ID NO: 610, SEQ ID NO: 1878, SEQ ID NO: 1879, SEQ ID NO: 1880, SEQ ID NO: 1881, SEQ ID NO: 1882, SEQ ID NO: 1883, SEQ ID NO: 1884, SEQ ID NO: 1885, SEQ ID NO: 1886, SEQ ID NO: 1887, SEQ ID NO: 1888, SEQ ID NO: 1889, SEQ ID NO: 1890, SEQ ID NO: 1891, SEQ ID NO: 1892, SEQ ID NO: 1893, or SEQ ID NO: 1894. In some embodiments that may be combined with any of the preceding embodiments, the APOBEC family deaminase domain is an AID deaminase domain, and the AID deaminase domain includes an amino acid sequence with at least 80% sequence identity, at least 82.5% sequence identity, at least 85% sequence identity, at least 87.5% sequence identity, at least 90% sequence identity, at least 91% sequence identity, at least 92% sequence identity, at least 93% sequence identity, at least 94% sequence identity, at least 95% sequence identity, at least 96% sequence identity, at least 97% sequence identity, at least 98% sequence identity, at least 99% sequence identity, at least 99.5% sequence identity, or at least 99.9% sequence identity to SEQ ID NO: 266, SEQ ID NO: 267, SEQ ID NO: 268, SEQ ID NO: 269, SEQ ID NO: 607, SEQ ID NO: 608, or SEQ ID NO: 1879. In some embodiments that may be combined with any of the preceding embodiments, the AID deaminase domain is SEQ ID NO: 266, SEQ ID NO: 267, SEQ ID NO: 268, SEQ ID NO: 269, SEQ ID NO: 607, SEQ ID NO: 608, or SEQ ID NO: 1879.

[0038] In some embodiments that may be combined with any of the preceding embodiments, the npUGI is selected from the group of a small molecule inhibitor of uracil-DNA glycosylase (UDG) or a nucleic acid inhibitor of UDG. In some embodiments that may be combined with any of the preceding embodiments, the small molecule inhibitor of UDG is a compound of formula (I):

[chemical structure]

or a pharmaceutically acceptable salt thereof, wherein: R¹ is H, a furanose carbohydrate, a pyranose carbohydrate, a carbohydrate mimetic, C₁₋₁₆alkyl, C₁₋₁₆alkenyl, C₁₋₁₆alkynyl, C₁₋₁₆alkoxy, or C₆₋₂₀aryl, wherein the furanose carbohydrate, or a derivative thereof, pyranose carbohydrate, or a derivative thereof, carbohydrate mimetic, C₁₋₁₆alkyl, C₁₋₁₆alkenyl, C₁₋₁₆alkynyl, C₁₋₁₆alkoxy, or C₆₋₂₀aryl is independently optionally substituted with one or more substituents selected from the group of hydroxyl, halo, cyano, NO₂, N(R⁴)(R⁵), C₁₋₁₆alkoxy, or C₆₋₂₀aryl, wherein the C₆₋₂₀aryl is further optionally substituted with one or more substituents selected from the group of C₁₋₁₆alkyl, C₁₋₁₆alkenyl, C₁₋₁₆alkynyl, C₁₋₁₆alkoxy, hydroxyl, halo, cyano, NO₂, or N(R⁴)(R⁵); L is O, S, or *—N(R³)—**, wherein R³ is H or C₁₋₁₆alkyl, and ** indicates the point of attachment to the R² moiety and * indicates the point of attachment to the remainder of the molecule; R² is H, N(R⁴)(R⁵), or C₆₋₂₀aryl, wherein the C₆₋₂₀aryl is independently substituted with one or more substituents selected from the group of C₁₋₁₆alkyl, C₁₋₁₆alkenyl, C₁₋₁₆alkynyl, or C₁₋₁₆alkoxy; R⁴ and R⁵ are each independently H or C₆₋₂₀aryl; and R⁶ is H or halo. In some embodiments that may be combined with any of the preceding embodiments, the nucleic acid inhibitor of UDG is selected from the group of a double-stranded RNA inhibitor, an antisense oligonucleotide inhibitor, a RNA/DNA hybrid inhibitor, a microRNA inhibitor, or a siRNA inhibitor. In some embodiments that may be combined with any of the preceding embodiments, the nucleic acid inhibitor reversibly inhibits an activity of an UDG. In some embodiments that may be combined with any of the preceding embodiments, the npUGI is a RNA guide of the Cas9 nickase domain, the dCas9 domain, the Cas12a nickase domain, or the dCas12a domain, wherein the RNA guide includes a 5′ end and a 3′ end, and wherein the RNA guide includes one or more deoxyuracil (dU) bases added to the 5′ end or the 3′ end. In some embodiments that may be combined with any of the preceding embodiments, the one or more dU bases are modified to resist glycosidic bond cleavage, have enhanced in vivo stability, or have enhanced ability to bind UDG, as compared to unmodified dU bases. In some embodiments that may be combined with any of the preceding embodiments, the one or more dU bases include a section of double-stranded DNA. In some embodiments that may be combined with any of the preceding embodiments, the section of double-stranded DNA includes one or more U:T pairs, U:G pairs, U:A pairs, U:C pairs, dU:T pairs, dU:G pairs, dU:A pairs, dU:T pairs, or any combination thereof (e.g., any combination of U or dU base mismatch pairs). In some embodiments that may be combined with any of the preceding embodiments, the UDG is an animal UDG. In some embodiments that may be combined with any of the preceding embodiments, the UDG is a plant UDG. In some embodiments that may be combined with any of the preceding embodiments, the plant UDG includes an amino acid sequence with at least 80% sequence identity, at least 82.5% sequence identity, at least 85% sequence identity, at least 87.5% sequence identity, at least 90% sequence identity, at least 91% sequence identity, at least 92% sequence identity, at least 93% sequence identity, at least 94% sequence identity, at least 95% sequence identity, at least 96% sequence identity, at least 97% sequence identity, at least 98% sequence identity, at least 99% sequence identity, at least 99.5% sequence identity, or at least 99.9% sequence identity to SEQ ID NO: 373, SEQ ID NO: 374, SEQ ID NO: 375, SEQ ID NO: 376, SEQ ID NO: 377, SEQ ID NO: 378, or SEQ ID NO: 379. In some embodiments that may be combined with any of the preceding embodiments, the plant UDG includes SEQ ID NO: 373, SEQ ID NO: 374, SEQ ID NO: 375, SEQ ID NO: 376, SEQ ID NO: 377, SEQ ID NO: 378, or SEQ ID NO: 379. In some embodiments that may be combined with any of the preceding embodiments, the fusion protein and the npUGI are chemically linked. In some embodiments that may be combined with any of the preceding embodiments, the fusion protein and the npUGI are not chemically linked.

[0039] Some aspects of the disclosure provide a base-editing system including a fusion protein including a DNA binding domain (e.g., a Cas9 domain, a Cas12a domain, a Cas12h domain, a Cas12i domain, a CasX domain, a CasY domain, a C2c1 domain, a C2c2 domain, a C2c3 domain, an Argonaute domain, or a ZF domain) fused to a nucleic acid editing domain, wherein the nucleic acid editing domain is fused to the N-terminus of the DNA binding domain. Some aspects of the disclosure provide a base-editing system including a fusion protein including a DNA binding domain (e.g., a Cas9 domain, a Cas12a domain, a Cas12h domain, a Cas12i domain, a CasX domain, a CasY domain, a C2c1 domain, a C2c2 domain, a C2c3 domain, an Argonaute domain, a TALE domain, or a ZF domain) fused to a nucleic acid editing domain, wherein the nucleic acid editing domain is fused to the C-terminus of the DNA binding domain. Some aspects of the disclosure provide a base-editing system including a fusion protein including a DNA binding domain (e.g., a Cas9 domain, a Cas12a domain, a Cas12h domain, a Cas12i domain, a CasX domain, a CasY domain, a C2c1 domain, a C2c2 domain, a C2c3 domain, an Argonaute domain, a TALE domain, or a ZF domain), wherein the nucleic acid editing domain is insertionally fused to the DNA binding domain. In some embodiments that may be combined with any of the preceding embodiments, the general architecture of exemplary base-editing systems provided herein includes the structure: [NH2]-[nucleic acid editing domain]-[DNA binding domain]-[COOH] or [NH2]-[DNA binding domain]-[nucleic acid editing domain]-[COOH], wherein NH2 is the N-terminus of the base-editing system, and COOH is the C-terminus of the base-editing system. Additional suitable nucleic acid editing domains will be apparent to the skilled artisan based on this disclosure and knowledge in the field.

[0040] In some aspects, the base-editing systems provided herein further include (iii) a programmable DNA-binding domain, for example, a ZF domain, a TALE, or a second Cas protein (e.g., a third protein). Without wishing to be bound by any particular theory, fusing a programmable DNA-binding domain (e.g., a Cas9 domain, a Cas12a domain, a Cas12h domain, a Cas12i domain, a CasX domain, a CasY domain, a C2c1 domain, a C2c2 domain, a C2c3 domain, a TALE domain, or a ZF domain) to a base-editing system including a fusion protein including (i) a DNA binding domain (e.g., a first domain); and (ii) a nucleic acid-editing domain (e.g., a second domain) may be useful for improving specificity of the base-editing system to a target nucleic acid sequence. In some embodiments, the third domain is a DNA binding domain (e.g., a Cas9 domain, a Cas12a domain, a Cas12h domain, a Cas12i domain, a CasX domain, a CasY domain, a C2c1 domain, a C2c2 domain, a C2c3 domain, an Argonaute domain, a TALE domain, or a ZF domain). In some embodiments, the third domain is any of the DNA binding domains provided herein. In some embodiments, the third domain is fused to N-terminus of the DNA binding domain or the nucleic acid-editing domain. In some embodiments, the third domain is fused to the C-terminus of the DNA binding domain or the nucleic acid-editing domain. In some embodiments, the third domain is insertionally fused to the of the DNA binding domain or the nucleic acid-editing domain.

[0041] In some embodiments, the DNA binding domain (e.g., a Cas9 domain, a Cas12a domain, a Cas12h domain, a Cas12i domain, a CasX domain, a CasY domain, a C2c1 domain, a C2c2 domain, a C2c3 domain, an Argonaute domain, a TALE domain, or a ZF domain) and the nucleic acid editing-editing domain are fused via a linker. In some embodiments, the third domain is fused to the DNA binding domain or the nucleic acid-editing domain via a linker (i.e., a second or third linker). In some embodiments, the linker includes a (GGGS)ₙ(SEQ ID NO: 265), a (GGGGS)ₙ(SEQ ID NO: 5), a (G)ₙ, an (EAAAK) (SEQ ID NO: 6), a (GGS)ₙ, (SGGS)ₙ (SEQ ID NO: 1877), an SGSETPGTSESATPES (SEQ ID NO: 7) motif (see, e.g., Guilinger et al., Nat. Biotechnol (2014) 32(6): 577-82), or an (XP)ₙ motif, or a combination of any of these, wherein n is independently an integer between 1 and 30. In some embodiments, n is independently 1, 2, 3, 4, 5, 6, 7, 8, 9, 10, 11, 12, 13, 14, 15, 16, 17, 18, 19, 20, 21, 22, 23, 24, 25, 26, 27, 28, 29, or 30, or, if more than one linker or more than one linker motif is present, any combination thereof. In some embodiments, the linker includes a (GGS)ₙ motif, wherein n is 1, 2, 3, 4, 5, 6, 7, 8, 9, 10, 11, 12, 13, 14 or 15. In some embodiments, the linker includes a (GGS)ₙ motif, wherein n is 1, 3, or 7. In some embodiments, the linker includes the amino acid sequence SGSETPGTSESATPES (SEQ ID NO: 7). Additional suitable linker motifs and linker configurations will be apparent to those of skill in the art. In some embodiments, suitable linker motifs and configurations include those described in Chen et al., Adv Drug Deliv Rev (2013) 65(10): 1357-69. It should be appreciated that any of the proteins provided in any of the general architectures of exemplary base-editing systems may be connected by one or more of the linkers provided herein. In some embodiments, the linkers are the same. In some embodiments, the linkers are different. In some embodiments, one or more of the proteins provided in any of the general architectures of exemplary DNA binding base-editing systems are not fused via a linker.

[0042] In some embodiments that may be combined with any of the preceding embodiments, the base-editing system further include a nuclear localization sequence (NLS). In some embodiments, the NLS is located N-terminal of the DNA binding domain or the nucleic acid-editing domain. In some embodiments, the NLS is located C-terminal of the DNA binding domain or the nucleic acid-editing domain. In some embodiments, the NLS is located insertionally to the DNA binding domain or the nucleic acid-editing domain. Nuclear localization sequences are known in the art and would be apparent to the skilled artisan. Exemplary NLS sequences are described in Plank et al., PCT/EP2000/011690. In some embodiments, a NLS includes the amino acid sequence PKKKRKV (SEQ ID NO: 741) or MDSLLMNRRKFLYQFKNVRWAKGRRETYLC (SEQ ID NO: 742). In some embodiments, the NLS is fused to the base-editing system via one or more linkers. In some embodiments, the NLS is fused to the base-editing system without a linker.

[0043] Other exemplary features that may be present are localization sequences, such as cytoplasmic localization sequences, export sequences, such as nuclear export sequences, or other localization sequences, as well as sequence tags that are useful for solubilization, purification, or detection of the base-editing systems. Suitable protein tags provided herein include, but are not limited to, biotin carboxylase carrier protein (BCCP) tags, myc-tags, calmodulin-tags, FLAG-tags, hemagglutinin (HA)-tags, polyhistidine tags, also referred to as histidine tags or His-tags, maltose binding protein (MBP)-tags, nus-tags, glutathione-S-transferase (GST)-tags, green fluorescent protein (GFP)-tags, thioredoxin-tags, S-tags, Softags (e.g., Softag 1, Softag 3), strep-tags, biotin ligase tags, FlAsH tags, V5 tags, and SBP-tags. Additional suitable sequences will be apparent to those of skill in the art. In some embodiments, the base-editing system includes one or more His tags. In some embodiments, the localization sequence or tag is fused to the base-editing system via one or more linkers. In some embodiments, the localization sequence or tag is fused to the base-editing system without a linker.

[0044] In some embodiments, the base-editing system of the present disclosure further includes a npUGI. In some embodiments, the npUGI is selected from the group including an organochemical inhibitor of uracil glycosylase, a nucleic acid based inhibitor of uracil-DNA glycosylase, or a RNA guide of a dCas nuclease (e.g., dCas9, dCas12a, dCas12h, dCas12i, dCasX, dCasY, dC2c1, dC2c2, or dC2c3) with a poly dU (deoxy-Uracil) extension.

### Methods of Using Base-Editing Systems

[0045] In some aspects, the present disclosure relates to methods of editing a target nucleic acid molecule, including contacting a target nucleic acid molecule with the base-editing system of any of the preceding embodiments, wherein the DNA binding domain of the fusion protein is the Cas domain.

[0046] In some aspects, the present disclosure relates to methods of editing a target nucleic acid molecule, including contacting a target nucleic acid molecule with the base-editing system of any of the preceding embodiments, wherein the DNA binding domain of the fusion protein is the TALE domain or the ZF domain.

[0047] In some embodiments that may be combined with any of the preceding embodiments, the fusion protein and the npUGI of the base-editing system are chemically linked. In some embodiments that may be combined with any of the preceding embodiments, the fusion protein and the npUGI are chemically linked by in vitro complexing or in vivo complexing. In some embodiments that may be combined with any of the preceding embodiments, the fusion protein and the npUGI of the base-editing system are not chemically linked. In some embodiments that may be combined with any of the preceding embodiments, the fusion protein and the npUGI are co-delivered, the fusion protein is delivered before the npUGI, or the npUGI is delivered before the fusion protein. In some embodiments that may be combined with any of the preceding embodiments, the base-editing system provided herein is generated in vitro by complexing. In some embodiments that may be combined with any of the preceding embodiments, the base-editing system provided herein is delivered by PEG-mediated transfection. In some embodiments that may be combined with any of the preceding embodiments, the base-editing system provided herein is generated in vitro by complexing a purified CRISPR-deaminase with the RNA-DNA hybrid guide RNA and is subsequently delivered by PEG-mediated transfection. In some embodiments that may be combined with any of the preceding embodiments, the base-editing system provided herein is vector-encoded. In some embodiments that may be combined with any of the preceding embodiments, the base-editing system provided herein is vector-encoded and co-delivered with exogenous nucleic acid via PEG-mediated transfection. In some embodiments that may be combined with any of the preceding embodiments, the base-editing system provided herein is delivered by PEG-mediated transfection while the small molecule inhibitor is delivered via cell culture media supplementation. In some embodiments that may be combined with any of the preceding embodiments, the target nucleic acid sequence is a double-stranded DNA (dsDNA) sequence, and the target nucleic acid sequence is in the genome of an organism. In some embodiments that may be combined with any of the preceding embodiments, the target nucleic acid sequence is associated with a disease or disorder, and the target nucleic acid sequence includes a point mutation. In some embodiments that may be combined with any of the preceding embodiments, the point mutation is a T to C point mutation, and the T to C point mutation is associated with the disease or disorder. In some embodiments that may be combined with any of the preceding embodiments, the point mutation is a T to C point mutation in a codon of the target nucleic acid sequence, and the point mutation results in an amino acid change in a polypeptide encoded by the target nucleic acid sequence as compared to a wild-type polypeptide encoded by a wild-type nucleic acid sequence without the point mutation. In some embodiments that may be combined with any of the preceding embodiments, contacting the target nucleic acid sequence with the base-editing system produces a nucleic acid sequence that is not associated with the disease or disorder. In some embodiments that may be combined with any of the preceding embodiments, contacting the target nucleic acid sequence with the base-editing system produces a wild-type nucleic acid sequence without the point mutation. In some embodiments that may be combined with any of the preceding embodiments, the disease or disorder is cystic fibrosis, phenylketonuria, epidermolytic hyperkeratosis (EHK), Charcot-Marie-Toot disease type 4J, neuroblastoma (NB), von Willebrand disease (vWD), myotonia congenital, hereditary renal amyloidosis, dilated cardiomyopathy (DCM), hereditary lymphedema, familial Alzheimer's disease, HIV, Prion disease, chronic infantile neurologic cutaneous articular syndrome (CINCA), desmin-related myopathy (DRM), a neoplastic disease associated with a mutant PI3KCA protein, a mutant CTNNBl protein, a mutant HRAS protein, or a mutant p53 protein. In some embodiments that may be combined with any of the preceding embodiments, the contacting is performed in vivo. In some embodiments that may be combined with any of the preceding embodiments, the contacting is performed in vitro. In some embodiments that may be combined with any of the preceding embodiments, the organism is a mammal, and the mammal is selected from the group of mouse, rat, human, pig, cow, chicken, rhesus monkey, or guinea pig. In some embodiments that may be combined with any of the preceding embodiments, the target nucleic acid sequence is selected from the group of a target nucleic acid sequence associated with a disease, a target nucleic acid sequence associated with a disorder, a target nucleic acid sequence associated with metabolic function, a target nucleic acid sequence associated with reproductive function, a target nucleic acid sequence associated with disease resistance function, a target nucleic acid sequence associated with stress tolerance function, a target nucleic acid sequence associated with agronomic function, or a target nucleic acid sequence associated with nutritional function. In some embodiments that may be combined with any of the preceding embodiments, contacting the target nucleic acid sequence with the base-editing system produces a nucleic acid sequence selected from the group of a nucleic acid sequence with a corrected deleterious mutation, a nucleic acid sequence derivative, a modified nucleic acid sequence, a nucleic acid sequence with an inserted sequence, a nucleic acid sequence with improved function, or a nucleic acid sequence with altered function. In some embodiments that may be combined with any of the preceding embodiments, the target nucleic acid sequence includes a point mutation, and contacting the target nucleic acid sequence with the base-editing system produces a wild-type nucleic acid sequence without the point mutation. In some embodiments that may be combined with any of the preceding embodiments, the contacting is performed in vivo. In some embodiments that may be combined with any of the preceding embodiments, the contacting is performed in vitro. In some embodiments that may be combined with any of the preceding embodiments, the organism is a plant, and the plant is selected from the group of sorghum, corn, tomato, rice, soybean, or wheat. In some embodiments that may be combined with any of the preceding embodiments, the organism is a prokaryote.

[0048] In some aspects, the present disclosure relates to methods for in vivo editing of a cytosine residue of a target DNA sequence, the method including a) contacting the target DNA sequence with the base-editing system of any one of claims 2-11 and 14-41, wherein the DNA binding domain of the fusion protein is the Cas domain, and a guide nucleic acid; and b) cultivating the cell through a cell division.

[0049] In some aspects, the present disclosure relates to methods for editing a nucleobase pair of a double-stranded DNA sequence, the method including: a) contacting a target region of the double-stranded DNA sequence, wherein the target region includes a target nucleobase pair, with the base-editing system of any one of claims 2-11 and 14-41, wherein the DNA binding domain of the fusion protein is the Cas domain, and a guide nucleic acid, wherein the target region includes a target nucleobase pair; b) inducing strand separation of said target region; c) converting a first nucleobase of said target nucleobase pair in a single strand of the target region to a second nucleobase; and d) cutting no more than one strand of said target region; wherein a third nucleobase complementary to the first nucleobase base is replaced by a fourth nucleobase complementary to the second nucleobase and the method causes less than 20%, less than 19%, less than 18%, less than 17%, less than 16%, less than 15%, less than 14%, less than 13%, less than 12%, less than 11%, less than 10%, less than 9%, less than 8%, less than 7%, less than 6%, less than 5%, less than 4%, less than 3%, less than 2%, less than 1%, less than 0.5%, less than 0.2%, or less than 0.1% indel formation in the double-stranded DNA sequence. In some embodiments that may be combined with any of the preceding embodiments, the cut single strand is hybridized to the guide nucleic acid. In some embodiments that may be combined with any of the preceding embodiments, the cut single strand is opposite to the strand including the first nucleobase. In some embodiments that may be combined with any of the preceding embodiments, the first base is a cytosine. In some embodiments that may be combined with any of the preceding embodiments, the second base is a uracil. In some embodiments that may be combined with any of the preceding embodiments, the Cas domain is selected from the group of a Cas nickase domain or a deactivated Cas domain.

[0050] In some aspects, the present disclosure relates to methods for editing a nucleobase pair of a double-stranded DNA sequence, the method including: a) contacting a target region of the double-stranded DNA sequence, wherein the target region includes a target nucleobase pair, with the base-editing system of any of claims 2-11 and 14-41, wherein the DNA binding domain of the fusion protein is the Cas domain, and a guide nucleic acid; b) inducing strand separation of said target region; c) converting a first nucleobase of said target nucleobase pair in a single strand of the target region to a second nucleobase; d) cutting no more than one strand of said target region; wherein a third nucleobase complementary to the first nucleobase base is replaced by a fourth nucleobase complementary to the second nucleobase; and e) replacing the second nucleobase with a fifth nucleobase that is complementary to the fourth nucleobase, thereby generating an intended edited basepair, wherein the efficiency of generating the intended edited basepair is at least 5%, at least 10%, at least 15%, at least 20%, at least 25%, at least 30%, at least 35%, at least 40%, at least 45%, at least 50%, at least 55%, at least 60%, at least 65%, or at least 70%. In some embodiments that may be combined with any of the preceding embodiments, the cut single strand is hybridized to the guide nucleic acid. In some embodiments that may be combined with any of the preceding embodiments, the cut single strand is opposite to the strand including the first nucleobase. In some embodiments that may be combined with any of the preceding embodiments, the first base is a cytosine. In some embodiments that may be combined with any of the preceding embodiments, the second base is an uracil. In some embodiments that may be combined with any of the preceding embodiments, the Cas domain is selected from the group of a Cas nickase domain or a deactivated Cas domain.

[0051] In some aspects, the present disclosure relates to methods for editing a nucleobase pair of a double-stranded DNA sequence, the method including: a) contacting a target region of the double-stranded DNA sequence, wherein the target region includes a target nucleobase pair, with the base-editing system of any of claims 2-11 and 14-41, wherein the DNA binding domain of the fusion protein is the Cas domain, and a guide nucleic acid; b) converting a first nucleobase of said target nucleobase pair of the target region to a second nucleobase; and c) inhibiting base excision repair of the second nucleobase.

[0052] In some aspects, the present disclosure relates to methods for editing a nucleobase pair of a double-stranded DNA sequence, the method including: a) contacting a target region of the double-stranded DNA sequence, wherein the target region includes a target nucleobase pair, with the base-editing system of any of claims 2-11 and 14-41, wherein the DNA binding domain of the fusion protein is the Cas domain, and a guide nucleic acid; b) converting a first nucleobase of said target nucleobase pair in the target region to a second nucleobase; and c) initiating mismatch repair to convert the nucleobase complementary to the first nucleobase on the non-edited strand to a nucleobase complementary to the second nucleobase.

[0053] In some embodiments that may be combined with any of the preceding embodiments, the Cas domain is selected from the group of a Cas 9 domain, a Cas12a domain, a Cas12h domain, a Cas12i domain, a CasX domain, a CasY domain, a C2c1 domain, a C2c2 domain, or a C2c3 domain. In some embodiments that may be combined with any of the preceding embodiments, the Cas domain is the Cas12a domain, and the Cas12a domain includes an amino acid sequence with at least 80% sequence identity, at least 82.5% sequence identity, at least 85% sequence identity, at least 87.5% sequence identity, at least 90% sequence identity, at least 91% sequence identity, at least 92% sequence identity, at least 93% sequence identity, at least 94% sequence identity, at least 95% sequence identity, at least 96% sequence identity, at least 97% sequence identity, at least 98% sequence identity, at least 99% sequence identity, at least 99.5% sequence identity, or at least 99.9% sequence identity to SEQ ID NO: 350, SEQ ID NO: 351, SEQ ID NO: 352, SEQ ID NO: 353, SEQ ID NO: 354, SEQ ID NO: 355, SEQ ID NO: 356, SEQ ID NO: 357, SEQ ID NO: 358, SEQ ID NO: 359, SEQ ID NO: 360, SEQ ID NO: 361, SEQ ID NO: 362, SEQ ID NO: 363, SEQ ID NO: 364, SEQ ID NO: 365, SEQ ID NO: 390, SEQ ID NO: 391, SEQ ID NO: 392, SEQ ID NO: 393, SEQ ID NO: 394, SEQ ID NO: 395, SEQ ID NO: 396, SEQ ID NO: 397, SEQ ID NO: 398, SEQ ID NO: 399, SEQ ID NO: 400, SEQ ID NO: 401, SEQ ID NO: 403, SEQ ID NO: 404, SEQ ID NO: 405, SEQ ID NO: 406, SEQ ID NO: 407, SEQ ID NO: 408, SEQ ID NO: 409, SEQ ID NO: 410, SEQ ID NO: 411, SEQ ID NO: 412, or SEQ ID NO: 413. In some embodiments that may be combined with any of the preceding embodiments, the Cas12a domain is SEQ ID NO: 350, SEQ ID NO: 351, SEQ ID NO: 352, SEQ ID NO: 353, SEQ ID NO: 354, SEQ ID NO: 355, SEQ ID NO: 356, SEQ ID NO: 357, SEQ ID NO: 358, SEQ ID NO: 359, SEQ ID NO: 360, SEQ ID NO: 361, SEQ ID NO: 362, SEQ ID NO: 363, SEQ ID NO: 364, SEQ ID NO: 365, SEQ ID NO: 390, SEQ ID NO: 391, SEQ ID NO: 392, SEQ ID NO: 393, SEQ ID NO: 394, SEQ ID NO: 395, SEQ ID NO: 396, SEQ ID NO: 397, SEQ ID NO: 398, SEQ ID NO: 399, SEQ ID NO: 400, SEQ ID NO: 401, SEQ ID NO: 403, SEQ ID NO: 404, SEQ ID NO: 405, SEQ ID NO: 406, SEQ ID NO: 407, SEQ ID NO: 408, SEQ ID NO: 409, SEQ ID NO: 410, SEQ ID NO: 411, SEQ ID NO: 412, or SEQ ID NO: 413. In some embodiments that may be combined with any of the preceding embodiments, the Cas domain is the Cas9 domain, and the Cas9 domain includes an amino acid sequence with at least 80% sequence identity, at least 82.5% sequence identity, at least 85% sequence identity, at least 87.5% sequence identity, at least 90% sequence identity, at least 91% sequence identity, at least 92% sequence identity, at least 93% sequence identity, at least 94% sequence identity, at least 95% sequence identity, at least 96% sequence identity, at least 97% sequence identity, at least 98% sequence identity, at least 99% sequence identity, at least 99.5% sequence identity, or at least 99.9% sequence identity to SEQ ID NO: 10, SEQ ID NO: 11, SEQ ID NO: 12, SEQ ID NO: 13, SEQ ID NO: 14, SEQ ID NO: 15, SEQ ID NO: 16, SEQ ID NO: 17, SEQ ID NO: 18, SEQ ID NO: 19, SEQ ID NO: 20, SEQ ID NO: 21, SEQ ID NO: 22, SEQ ID NO: 23, SEQ ID NO: 24, SEQ ID NO: 25, SEQ ID NO: 26, SEQ ID NO: 27, SEQ ID NO: 28, SEQ ID NO: 29, SEQ ID NO: 30, SEQ ID NO: 31, SEQ ID NO: 32, SEQ ID NO: 33, SEQ ID NO: 34, SEQ ID NO: 35, SEQ ID NO: 36, SEQ ID NO: 37, SEQ ID NO: 38, SEQ ID NO: 39, SEQ ID NO: 40, SEQ ID NO: 41, SEQ ID NO: 42, SEQ ID NO: 43, SEQ ID NO: 44, SEQ ID NO: 45, SEQ ID NO: 46, SEQ ID NO: 47, SEQ ID NO: 48, SEQ ID NO: 49, SEQ ID NO: 50, SEQ ID NO: 51, SEQ ID NO: 52, SEQ ID NO: 53, SEQ ID NO: 54, SEQ ID NO: 55, SEQ ID NO: 56, SEQ ID NO: 57, SEQ ID NO: 58, SEQ ID NO: 59, SEQ ID NO: 60, SEQ ID NO: 61, SEQ ID NO: 62, SEQ ID NO: 63, SEQ ID NO: 64, SEQ ID NO: 65, SEQ ID NO: 66, SEQ ID NO: 67, SEQ ID NO: 68, SEQ ID NO: 69, SEQ ID NO: 70, SEQ ID NO: 71, SEQ ID NO: 72, SEQ ID NO: 73, SEQ ID NO: 74, SEQ ID NO: 75, SEQ ID NO: 76, SEQ ID NO: 77, SEQ ID NO: 78, SEQ ID NO: 79, SEQ ID NO: 80, SEQ ID NO: 81, SEQ ID NO: 82, SEQ ID NO: 83, SEQ ID NO: 84, SEQ ID NO: 85, SEQ ID NO: 86, SEQ ID NO: 87, SEQ ID NO: 88, SEQ ID NO: 89, SEQ ID NO: 90, SEQ ID NO: 91, SEQ ID NO: 92, SEQ ID NO: 93, SEQ ID NO: 94, SEQ ID NO: 95, SEQ ID NO: 96, SEQ ID NO: 97, SEQ ID NO: 98, SEQ ID NO: 99, SEQ ID NO: 100, SEQ ID NO: 101, SEQ ID NO: 102, SEQ ID NO: 103, SEQ ID NO: 104, SEQ ID NO: 105, SEQ ID NO: 106, SEQ ID NO: 107, SEQ ID NO: 108, SEQ ID NO: 109, SEQ ID NO: 110, SEQ ID NO: 111, SEQ ID NO: 112, SEQ ID NO: 113, SEQ ID NO: 114, SEQ ID NO: 115, SEQ ID NO: 116, SEQ ID NO: 117, SEQ ID NO: 118, SEQ ID NO: 119, SEQ ID NO: 120, SEQ ID NO: 121, SEQ ID NO: 122, SEQ ID NO: 123, SEQ ID NO: 124, SEQ ID NO: 125, SEQ ID NO: 126, SEQ ID NO: 127, SEQ ID NO: 128, SEQ ID NO: 129, SEQ ID NO: 130, SEQ ID NO: 131, SEQ ID NO: 132, SEQ ID NO: 133, SEQ ID NO: 134, SEQ ID NO: 135, SEQ ID NO: 136, SEQ ID NO: 137, SEQ ID NO: 138, SEQ ID NO: 139, SEQ ID NO: 140, SEQ ID NO: 141, SEQ ID NO: 142, SEQ ID NO: 143, SEQ ID NO: 144, SEQ ID NO: 145, SEQ ID NO: 146, SEQ ID NO: 147, SEQ ID NO: 148, SEQ ID NO: 149, SEQ ID NO: 150, SEQ ID NO: 151, SEQ ID NO: 152, SEQ ID NO: 153, SEQ ID NO: 154, SEQ ID NO: 155, SEQ ID NO: 156, SEQ ID NO: 157, SEQ ID NO: 158, SEQ ID NO: 159, SEQ ID NO: 160, SEQ ID NO: 161, SEQ ID NO: 162, SEQ ID NO: 163, SEQ ID NO: 164, SEQ ID NO: 165, SEQ ID NO: 166, SEQ ID NO: 167, SEQ ID NO: 168, SEQ ID NO: 169, SEQ ID NO: 170, SEQ ID NO: 171, SEQ ID NO: 172, SEQ ID NO: 173, SEQ ID NO: 174, SEQ ID NO: 175, SEQ ID NO: 176, SEQ ID NO: 177, SEQ ID NO: 178, SEQ ID NO: 179, SEQ ID NO: 180, SEQ ID NO: 181, SEQ ID NO: 182, SEQ ID NO: 183, SEQ ID NO: 184, SEQ ID NO: 185, SEQ ID NO: 186, SEQ ID NO: 187, SEQ ID NO: 188, SEQ ID NO: 189, SEQ ID NO: 190, SEQ ID NO: 191, SEQ ID NO: 192, SEQ ID NO: 193, SEQ ID NO: 194, SEQ ID NO: 195, SEQ ID NO: 196, SEQ ID NO: 197, SEQ ID NO: 198, SEQ ID NO: 199, SEQ ID NO: 200, SEQ ID NO: 201, SEQ ID NO: 202, SEQ ID NO: 203, SEQ ID NO: 204, SEQ ID NO: 205, SEQ ID NO: 206, SEQ ID NO: 207, SEQ ID NO: 208, SEQ ID NO: 209, SEQ ID NO: 210, SEQ ID NO: 211, SEQ ID NO: 212, SEQ ID NO: 213, SEQ ID NO: 214, SEQ ID NO: 215, SEQ ID NO: 216, SEQ ID NO: 217, SEQ ID NO: 218, SEQ ID NO: 219, SEQ ID NO: 220, SEQ ID NO: 221, SEQ ID NO: 222, SEQ ID NO: 223, SEQ ID NO: 224, SEQ ID NO: 225, SEQ ID NO: 226, SEQ ID NO: 227, SEQ ID NO: 228, SEQ ID NO: 229, SEQ ID NO: 230, SEQ ID NO: 231, SEQ ID NO: 232, SEQ ID NO: 233, SEQ ID NO: 234, SEQ ID NO: 235, SEQ ID NO: 236, SEQ ID NO: 237, SEQ ID NO: 238, SEQ ID NO: 239, SEQ ID NO: 240, SEQ ID NO: 241, SEQ ID NO: 242, SEQ ID NO: 243, SEQ ID NO: 244, SEQ ID NO: 245, SEQ ID NO: 246, SEQ ID NO: 247, SEQ ID NO: 248, SEQ ID NO: 249, SEQ ID NO: 250, SEQ ID NO: 251, SEQ ID NO: 252, SEQ ID NO: 253, SEQ ID NO: 254, SEQ ID NO: 255, SEQ ID NO: 256, SEQ ID NO: 257, SEQ ID NO: 258, SEQ ID NO: 259, SEQ ID NO: 260, SEQ ID NO: 261, SEQ ID NO: 262, SEQ ID NO: 263, SEQ ID NO: 325, SEQ ID NO: 674, SEQ ID NO: 1869, SEQ ID NO: 1870, SEQ ID NO: 1871, SEQ ID NO: 1872, SEQ ID NO: 1873, SEQ ID NO: 1874, SEQ ID NO: 1875, or SEQ ID NO: 1876. In some embodiments that may be combined with any of the preceding embodiments, the Cas9 domain is SEQ ID NO: 10, SEQ ID NO: 11, SEQ ID NO: 12, SEQ ID NO: 13, SEQ ID NO: 14, SEQ ID NO: 15, SEQ ID NO: 16, SEQ ID NO: 17, SEQ ID NO: 18, SEQ ID NO: 19, SEQ ID NO: 20, SEQ ID NO: 21, SEQ ID NO: 22, SEQ ID NO: 23, SEQ ID NO: 24, SEQ ID NO: 25, SEQ ID NO: 26, SEQ ID NO: 27, SEQ ID NO: 28, SEQ ID NO: 29, SEQ ID NO: 30, SEQ ID NO: 31, SEQ ID NO: 32, SEQ ID NO: 33, SEQ ID NO: 34, SEQ ID NO: 35, SEQ ID NO: 36, SEQ ID NO: 37, SEQ ID NO: 38, SEQ ID NO: 39, SEQ ID NO: 40, SEQ ID NO: 41, SEQ ID NO: 42, SEQ ID NO: 43, SEQ ID NO: 44, SEQ ID NO: 45, SEQ ID NO: 46, SEQ ID NO: 47, SEQ ID NO: 48, SEQ ID NO: 49, SEQ ID NO: 50, SEQ ID NO: 51, SEQ ID NO: 52, SEQ ID NO: 53, SEQ ID NO: 54, SEQ ID NO: 55, SEQ ID NO: 56, SEQ ID NO: 57, SEQ ID NO: 58, SEQ ID NO: 59, SEQ ID NO: 60, SEQ ID NO: 61, SEQ ID NO: 62, SEQ ID NO: 63, SEQ ID NO: 64, SEQ ID NO: 65, SEQ ID NO: 66, SEQ ID NO: 67, SEQ ID NO: 68, SEQ ID NO: 69, SEQ ID NO: 70, SEQ ID NO: 71, SEQ ID NO: 72, SEQ ID NO: 73, SEQ ID NO: 74, SEQ ID NO: 75, SEQ ID NO: 76, SEQ ID NO: 77, SEQ ID NO: 78, SEQ ID NO: 79, SEQ ID NO: 80, SEQ ID NO: 81, SEQ ID NO: 82, SEQ ID NO: 83, SEQ ID NO: 84, SEQ ID NO: 85, SEQ ID NO: 86, SEQ ID NO: 87, SEQ ID NO: 88, SEQ ID NO: 89, SEQ ID NO: 90, SEQ ID NO: 91, SEQ ID NO: 92, SEQ ID NO: 93, SEQ ID NO: 94, SEQ ID NO: 95, SEQ ID NO: 96, SEQ ID NO: 97, SEQ ID NO: 98, SEQ ID NO: 99, SEQ ID NO: 100, SEQ ID NO: 101, SEQ ID NO: 102, SEQ ID NO: 103, SEQ ID NO: 104, SEQ ID NO: 105, SEQ ID NO: 106, SEQ ID NO: 107, SEQ ID NO: 108, SEQ ID NO: 109, SEQ ID NO: 110, SEQ ID NO: 111, SEQ ID NO: 112, SEQ ID NO: 113, SEQ ID NO: 114, SEQ ID NO: 115, SEQ ID NO: 116, SEQ ID NO: 117, SEQ ID NO: 118, SEQ ID NO: 119, SEQ ID NO: 120, SEQ ID NO: 121, SEQ ID NO: 122, SEQ ID NO: 123, SEQ ID NO: 124, SEQ ID NO: 125, SEQ ID NO: 126, SEQ ID NO: 127, SEQ ID NO: 128, SEQ ID NO: 129, SEQ ID NO: 130, SEQ ID NO: 131, SEQ ID NO: 132, SEQ ID NO: 133, SEQ ID NO: 134, SEQ ID NO: 135, SEQ ID NO: 136, SEQ ID NO: 137, SEQ ID NO: 138, SEQ ID NO: 139, SEQ ID NO: 140, SEQ ID NO: 141, SEQ ID NO: 142, SEQ ID NO: 143, SEQ ID NO: 144, SEQ ID NO: 145, SEQ ID NO: 146, SEQ ID NO: 147, SEQ ID NO: 148, SEQ ID NO: 149, SEQ ID NO: 150, SEQ ID NO: 151, SEQ ID NO: 152, SEQ ID NO: 153, SEQ ID NO: 154, SEQ ID NO: 155, SEQ ID NO: 156, SEQ ID NO: 157, SEQ ID NO: 158, SEQ ID NO: 159, SEQ ID NO: 160, SEQ ID NO: 161, SEQ ID NO: 162, SEQ ID NO: 163, SEQ ID NO: 164, SEQ ID NO: 165, SEQ ID NO: 166, SEQ ID NO: 167, SEQ ID NO: 168, SEQ ID NO: 169, SEQ ID NO: 170, SEQ ID NO: 171, SEQ ID NO: 172, SEQ ID NO: 173, SEQ ID NO: 174, SEQ ID NO: 175, SEQ ID NO: 176, SEQ ID NO: 177, SEQ ID NO: 178, SEQ ID NO: 179, SEQ ID NO: 180, SEQ ID NO: 181, SEQ ID NO: 182, SEQ ID NO: 183, SEQ ID NO: 184, SEQ ID NO: 185, SEQ ID NO: 186, SEQ ID NO: 187, SEQ ID NO: 188, SEQ ID NO: 189, SEQ ID NO: 190, SEQ ID NO: 191, SEQ ID NO: 192, SEQ ID NO: 193, SEQ ID NO: 194, SEQ ID NO: 195, SEQ ID NO: 196, SEQ ID NO: 197, SEQ ID NO: 198, SEQ ID NO: 199, SEQ ID NO: 200, SEQ ID NO: 201, SEQ ID NO: 202, SEQ ID NO: 203, SEQ ID NO: 204, SEQ ID NO: 205, SEQ ID NO: 206, SEQ ID NO: 207, SEQ ID NO: 208, SEQ ID NO: 209, SEQ ID NO: 210, SEQ ID NO: 211, SEQ ID NO: 212, SEQ ID NO: 213, SEQ ID NO: 214, SEQ ID NO: 215, SEQ ID NO: 216, SEQ ID NO: 217, SEQ ID NO: 218, SEQ ID NO: 219, SEQ ID NO: 220, SEQ ID NO: 221, SEQ ID NO: 222, SEQ ID NO: 223, SEQ ID NO: 224, SEQ ID NO: 225, SEQ ID NO: 226, SEQ ID NO: 227, SEQ ID NO: 228, SEQ ID NO: 229, SEQ ID NO: 230, SEQ ID NO: 231, SEQ ID NO: 232, SEQ ID NO: 233, SEQ ID NO: 234, SEQ ID NO: 235, SEQ ID NO: 236, SEQ ID NO: 237, SEQ ID NO: 238, SEQ ID NO: 239, SEQ ID NO: 240, SEQ ID NO: 241, SEQ ID NO: 242, SEQ ID NO: 243, SEQ ID NO: 244, SEQ ID NO: 245, SEQ ID NO: 246, SEQ ID NO: 247, SEQ ID NO: 248, SEQ ID NO: 249, SEQ ID NO: 250, SEQ ID NO: 251, SEQ ID NO: 252, SEQ ID NO: 253, SEQ ID NO: 254, SEQ ID NO: 255, SEQ ID NO: 256, SEQ ID NO: 257, SEQ ID NO: 258, SEQ ID NO: 259, SEQ ID NO: 260, SEQ ID NO: 261, SEQ ID NO: 262, SEQ ID NO: 263, SEQ ID NO: 325, SEQ ID NO: 674, SEQ ID NO: 1869, SEQ ID NO: 1870, SEQ ID NO: 1871, SEQ ID NO: 1872, SEQ ID NO: 1873, SEQ ID NO: 1874, SEQ ID NO: 1875, or SEQ ID NO: 1876. In some embodiments that may be combined with any of the preceding embodiments, the Cas9 domain is SEQ ID NO: 674.

[0054] In some aspects, the present disclosure relates to methods for in vivo editing of a cytosine residue of a target DNA sequence, the method including a) contacting the target DNA sequence with the base-editing system of any one of claims 12-41, wherein the DNA binding domain of the fusion protein is the TALE domain or the ZF domain; and b) cultivating the cell through a cell division.

[0055] In some embodiments that may be combined with any of the preceding embodiments, the cytidine deaminase domain is an APOBEC family deaminase domain. In some embodiments that may be combined with any of the preceding embodiments, the APOBEC family deaminase domain includes an amino acid sequence with at least 80% sequence identity, at least 82.5% sequence identity, at least 85% sequence identity, at least 87.5% sequence identity, at least 90% sequence identity, at least 91% sequence identity, at least 92% sequence identity, at least 93% sequence identity, at least 94% sequence identity, at least 95% sequence identity, at least 96% sequence identity, at least 97% sequence identity, at least 98% sequence identity, at least 99% sequence identity, at least 99.5% sequence identity, or at least 99.9% sequence identity to SEQ ID NO: 266, SEQ ID NO: 267, SEQ ID NO: 268, SEQ ID NO: 269, SEQ ID NO: 270, SEQ ID NO: 271, SEQ ID NO: 272, SEQ ID NO: 273, SEQ ID NO: 274, SEQ ID NO: 275, SEQ ID NO: 276, SEQ ID NO: 277, SEQ ID NO: 278, SEQ ID NO: 279, SEQ ID NO: 280, SEQ ID NO: 281, SEQ ID NO: 282, SEQ ID NO: 283, SEQ ID NO: 284, SEQ ID NO: 607, SEQ ID NO: 608, SEQ ID NO: 609, SEQ ID NO: 610, SEQ ID NO: 1878, SEQ ID NO: 1879, SEQ ID NO: 1880, SEQ ID NO: 1881, SEQ ID NO: 1882, SEQ ID NO: 1883, SEQ ID NO: 1884, SEQ ID NO: 1885, SEQ ID NO: 1886, SEQ ID NO: 1887, SEQ ID NO: 1888, SEQ ID NO: 1889, SEQ ID NO: 1890, SEQ ID NO: 1891, SEQ ID NO: 1892, SEQ ID NO: 1893, or SEQ ID NO: 1894. In some embodiments that may be combined with any of the preceding embodiments, the APOBEC family deaminase domain is SEQ ID NO: 266, SEQ ID NO: 267, SEQ ID NO: 268, SEQ ID NO: 269, SEQ ID NO: 270, SEQ ID NO: 271, SEQ ID NO: 272, SEQ ID NO: 273, SEQ ID NO: 274, SEQ ID NO: 275, SEQ ID NO: 276, SEQ ID NO: 277, SEQ ID NO: 278, SEQ ID NO: 279, SEQ ID NO: 280, SEQ ID NO: 281, SEQ ID NO: 282, SEQ ID NO: 283, SEQ ID NO: 284, SEQ ID NO: 607, SEQ ID NO: 608, SEQ ID NO: 609, SEQ ID NO: 610, SEQ ID NO: 1878, SEQ ID NO: 1879, SEQ ID NO: 1880, SEQ ID NO: 1881, SEQ ID NO: 1882, SEQ ID NO: 1883, SEQ ID NO: 1884, SEQ ID NO: 1885, SEQ ID NO: 1886, SEQ ID NO: 1887, SEQ ID NO: 1888, SEQ ID NO: 1889, SEQ ID NO: 1890, SEQ ID NO: 1891, SEQ ID NO: 1892, SEQ ID NO: 1893, or SEQ ID NO: 1894. In some embodiments that may be combined with any of the preceding embodiments, the APOBEC family deaminase domain is an activation-induced deaminase (AID) domain. In some embodiments that may be combined with any of the preceding embodiments, the AID deaminase domain includes an amino acid sequence with at least 80% sequence identity, at least 82.5% sequence identity, at least 85% sequence identity, at least 87.5% sequence identity, at least 90% sequence identity, at least 91% sequence identity, at least 92% sequence identity, at least 93% sequence identity, at least 94% sequence identity, at least 95% sequence identity, at least 96% sequence identity, at least 97% sequence identity, at least 98% sequence identity, at least 99% sequence identity, at least 99.5% sequence identity, or at least 99.9% sequence identity to SEQ ID NO: 266, SEQ ID NO: 267, SEQ ID NO: 268, SEQ ID NO: 269, SEQ ID NO: 607, SEQ ID NO: 608, or SEQ ID NO: 1879. In some embodiments that may be combined with any of the preceding embodiments, the AID deaminase domain is SEQ ID NO: 266, SEQ ID NO: 267, SEQ ID NO: 268, SEQ ID NO: 269, SEQ ID NO: 607, SEQ ID NO: 608, or SEQ ID NO: 1879. In some embodiments that may be combined with any of the preceding embodiments, the npUGI of the base-editing system is selected from the group of a small molecule inhibitor of uracil-DNA glycosylase (UDG) or a nucleic acid inhibitor of UDG. In some embodiments that may be combined with any of the preceding embodiments, the Cas domain is the Cas nickase domain or the deactivated Cas domain, the npUGI of the base-editing system is a RNA guide of the Cas nickase domain or the deactivated Cas domain, the RNA guide has a 5′ end and a 3′ end, and the RNA guide has one or more deoxyuracil (dU) bases added to the 5′ end or the 3′ end. In some embodiments that may be combined with any of the preceding embodiments, the fusion protein and the npUGI are chemically linked. In some embodiments that may be combined with any of the preceding embodiments, the fusion protein and the npUGI are chemically linked by in vitro complexing or in vivo complexing. In some embodiments that may be combined with any of the preceding embodiments, the fusion protein and the npUGI are not chemically linked. In some embodiments that may be combined with any of the preceding embodiments, the fusion protein and the npUGI are co-delivered, the fusion protein is delivered before the npUGI, or the npUGI is delivered before the fusion protein. In some embodiments that may be combined with any of the preceding embodiments, the base-editing system provided herein is generated in vitro by complexing. In some embodiments that may be combined with any of the preceding embodiments, the base-editing system provided herein is delivered by PEG-mediated transfection. In some embodiments that may be combined with any of the preceding embodiments, the base-editing system provided herein is generated in vitro by complexing a purified CRISPR-deaminase with the RNA-DNA hybrid guide RNA and is subsequently delivered by PEG-mediated transfection. In some embodiments that may be combined with any of the preceding embodiments, the base-editing system provided herein is vector-encoded. In some embodiments that may be combined with any of the preceding embodiments, the base-editing system provided herein is vector-encoded and co-delivered with exogenous nucleic acid via PEG-mediated transfection. In some embodiments that may be combined with any of the preceding embodiments, the base-editing system provided herein is delivered by PEG-mediated transfection while the small molecule inhibitor is delivered via cell culture media supplementation. In some embodiments that may be combined with any of the preceding embodiments, the DNA sequence is in the genome of an organism. In some embodiments that may be combined with any of the preceding embodiments, the organism is a mammal selected from the group of mouse, rat, human, pig, cow, chicken, rhesus monkey, or guinea pig. In some embodiments that may be combined with any of the preceding embodiments, the organism is a plant selected from the group of sorghum, corn, tomato, rice, soybean, or wheat.

### DNA Binding Domains

[0056] In some aspects, the present disclosure relates to DNA binding domains or DNA sequence targeting components. In some embodiments, the DNA binding domain or DNA sequence-targeting component is a Cas DNA endonuclease (e.g., a Cas domain), a transcription activator-like effector (TALE) (e.g., a TALE domain), a Zinc Finger (ZF) (e.g., a ZF domain), a meganuclease (e.g., a meganuclease domain), or an Argonaute (e.g., an Argonaute domain). In some embodiments, the Cas domain is a Cas9 domain, a nuclease inactive Cas9 (dCas9) domain, a Cas9 nickase domain, a Cas12a domain, a nuclease inactive Cas12a (dCas12a) domain, a Cas12a nickase domain, a Cas12h domain, a Cas12i domain, a CasX domain, a CasY domain, a C2c1 domain, a C2c2 domain, or a C2c3 domain.

[0057] In some embodiments, the DNA binding domain of any of the base-editing systems provided herein is a single effector of a microbial CRISPR-Cas system. Single effectors of microbial CRISPR-Cas systems include, without limitation, Cas9, Cas12a, Cas12h, Cas12i, CasX, CasY, C2c1, C2c2, and C2c3. Typically, microbial CRISPR-Cas systems are divided into Class 1 and Class 2 systems. Class 1 systems have multisubunit effector complexes, while Class 2 systems have a single protein effector. Cas9 and Cas12a are Class 2 effectors.

[0058] The term “RNA-programmable nuclease,” and “RNA-guided nuclease” are used interchangeably herein and refer to a nuclease that forms a complex with (e.g., binds or associates with) one or more RNA that is not a target for cleavage. In some embodiments, an RNA-programmable nuclease, when in a complex with an RNA, may be referred to as a nuclease:RNA complex. Typically, the bound RNA(s) is referred to as a guide RNA (gRNA). gRNAs can exist as a complex of two or more RNAs, or as a single RNA molecule. gRNAs that exist as a single RNA molecule may be referred to as single-guide RNAs (sgRNAs), though “gRNA” is used interchangeably to refer to guide RNAs that exist as either single molecules or as a complex of two or more molecules. Typically, gRNAs that exist as single RNA species include two domains: (1) a domain that shares homology to a target nucleic acid and directs binding of a Cas complex (e.g., a Cas9 complex, Cas12a complex, a Cas12h complex, a Cas12i complex, a CasX complex, a CasY complex, a C2c1 complex, a C2c2 complex, or a C2c3 complex) to the target; and (2) a domain that binds a Cas protein (e.g., a Cas9 protein, a Cas12a protein, a Cas12h protein, a Cas12i protein, a CasX protein, a CasY protein, a C2c1 protein, a C2c2 protein, or a C2c3 protein). In some embodiments, domain (2) corresponds to a sequence known as a tracrRNA, and includes a stem-loop structure. For example, in some embodiments, domain (2) is identical or homologous to a tracrRNA as provided in Jinek et al., Science (2012) 337:816-821. Other examples of gRNAs (e.g., those including domain 2) can be found in U.S. Provisional Patent Application Ser. No. 61/874,682, filed Sep. 6, 2013; and U.S. Provisional Patent Application Ser. No. 61/874,746, filed Sep. 6, 2013. In some embodiments, a gRNA includes two or more of domains (1) and (2), and may be referred to as an “extended gRNA.” For example, an extended gRNA will, e.g., bind two or more Cas9 proteins and bind a target nucleic acid at two or more distinct regions, as described herein. The gRNA includes a nucleotide sequence that complements a target site, which mediates binding of the nuclease/RNA complex to said target site, providing the sequence specificity of the nuclease:RNA complex. In some embodiments, the RNA-programmable nuclease is the (CRISPR-associated system) Cas9 endonuclease, for example Cas9 (Csn1) from S. pyogenes (see, e.g., Ferretti et al., PNAS (2001) 98:4658-4663; Deltcheva et al., Nature (2011) 471:602-607; and Jinek et al., Science (2012) 337:816-821). In some embodiments, the RNA-programmable nuclease is the (CRISPR-associated system) Cas12a endonuclease, for example Cas12a from Lachnospiraceae bacterium. Cas domain containing base-editing systems can include one or more RNA sequences, or DNA sequences encoding the RNA sequences. The RNA sequences may be fused at least temporarily to the guide RNA (crRNA), or be expressed separately therefrom. Examples of such sequences can include pre-crRNAs, tracR sequences or putative tracR sequences, direct repeat RNAs of corresponding CRISPR arrays, RNA sequences mediating tethering, RNAi or siRNA sequences mediating silencing of one or more endogenous genes, as well as RNA-processing regions like tRNAs or ribozymes.

[0059] Because RNA-programmable nucleases (e.g., Cas9, Cas12a, Cas12h, Cas12i, CasX, CasY, C2c1, C2c2, or C2c3) use RNA:DNA hybridization to target DNA cleavage sites, these proteins are able to be targeted, in principle, to any sequence specified by the guide RNA. Methods of using RNA-programmable nucleases, such as Cas (e.g., Cas9, Cas12a, Cas12h, Cas12i, CasX, CasY, C2c1, C2c2, or C2c3), for site-specific cleavage (e.g., to modify a genome) are known in the art (see e.g., Cong et al., Science 339 (2013), 819-823; Mali et al., Science (2013) 339, 823-826; Hwang, et al., Nat Biotechnol (2013) 31, 227-229; Jinek et al., eLife (2013) 2, e00471; Dicarlo et al., Nucleic Acids Res (2013); Jiang et al., Nat Biotechnol (2013) 31, 233-239).

[0060] Any of the names of the Cas domains may be modified by the initials of the organism from which it has been derived. For example, Streptococcus pyogenes Cas9 may be referred to as SpCas9, Lachnospiraceae bacterium Cas12a may be referred to as LbCas12a, and Acidaminococcus sp. Cas12a may be referred to as AsCas12a.

### Cas9 Domains

[0061] The clustered regularly interspaced short palindromic repeat (CRISPR) system is a recently discovered prokaryotic adaptive immune system (Jansen et al., Mol Microbiol (2002) 43(6): 1565-75. PMID: 11952905) that has been modified to enable robust and general genome engineering in a variety of organisms and cell lines (Mali et al., Nat Methods (2013) 10(10):957-63. PMID: 24076990). CRISPR-Cas (CRISPR associated) systems are protein-RNA complexes that use an RNA molecule (sgRNA) as a guide to localize the complex to a target DNA sequence via base-pairing (Jore et al., Nat Struct Mol Biol (2011) 18(5):529-36. PMID: 21460843). In the natural systems, a Cas protein then acts as an endonuclease to cleave the targeted DNA sequence (Horvath and Barrangou, Science (2010) 327(5962): 167-70. PMID: 20056882). The target DNA sequence must be both complementary to the sgRNA, and also contain a “protospacer-adjacent motif (PAM) at the 3′-end of the complementary region in order for the system to function (Wiedenheft et al., Nature (2012) 482(7385):331-8. PMID: 22337052).

[0062] Among the known Cas proteins, S. pyogenes Cas9 has been mostly widely used as a tool for genome engineering (Gasiunas et al., Trends Microbiol (2013) 21(1.1):562-7. PMID: 24095303). Point mutations can be introduced into a Cas protein to abolish nuclease activity, resulting in a dead Cas (dCas) that still retains its ability to bind DNA in a sgRNA-programmed manner (Qi et al., Cell (2013) 152(5): 1173-83. PMID: 23452860). In principle, when fused to another protein or domain, a dCas can target that protein to virtually any DNA sequence simply by co-expression with an appropriate sgRNA (Mali et al, Nat Methods (2013) 10(10):957-63. PMID: 24076990; Qi et al., Cell (2013) 152(5): 1173-83. PMID: 23452860; Perez-Pinera et al., Nat Methods (2013) 10(10):973-6. PMID: 23892895; Mali et al., Nat Biotechnol (2013) 31(9):833-8. PMID: 23907171; Gilbert et al., Cell (2013) 154(2):442-51. PMID: 23849981; Larson et al., Nat Protoc (2013) 8(11):2180-96. PMID: 24136345; Mali et al., Science (2013) 339(6121):823-6. PMID: 23287722).

[0063] In some embodiments, the present disclosure relates to Cas9 domains. The Cas9 domain may be a nuclease active Cas9 domain, a nuclease inactive Cas9 domain (dCas9), or a Cas9 nickase. The term “Cas9” or “Cas9 nuclease” refers to an RNA-guided nuclease including a Cas9 protein, or a portion thereof (e.g., a protein including an active, inactive, or partially active DNA cleavage domain of Cas9, and/or the gRNA binding domain of Cas9). A Cas9 nuclease is also referred to sometimes as a casn1 nuclease or a CRISPR (clustered regularly interspaced short palindromic repeat)-associated nuclease (see, e.g., Charpentier and Doudna, Nature (2013) 495, (7439):50-1. PMID: 23467164). CRISPR is an adaptive immune system that provides protection against mobile genetic elements (viruses, transposable elements and conjugative plasmids). CRISPR clusters contain spacers, sequences complementary to antecedent mobile elements, and target invading nucleic acids. CRISPR clusters are transcribed and processed into CRISPR RNA (crRNA). In type II CRISPR systems, correct processing of pre-crRNA requires a trans-encoded small RNA (tracrRNA), endogenous ribonuclease 3 (rnc) and a Cas9 protein. The tracrRNA serves as a guide for ribonuclease 3-aided processing of pre-crRNA. Subsequently, Cas9/crRNA/tracrRNA endonucleolytically cleaves linear or circular dsDNA target complementary to the spacer. The target strand not complementary to crRNA is first cut endonucleolytically, then trimmed 3′-5′ exonucleolytically. In nature, DNA-binding and cleavage typically requires protein and both RNAs. However, single guide RNAs (“sgRNA”, or simply “gNRA”) can be engineered so as to incorporate aspects of both the crRNA and tracrRNA into a single RNA species (see, e.g., Jinek et al, Science (2012) 337:816-821). Cas9 recognizes a short motif in the CRISPR repeat sequences (the PAM or protospacer adjacent motif) to help distinguish self versus non-self Cas9 nuclease sequences and structures are well known to those of skill in the art (see, e.g., Ferretti et al, PNAS (2001) 98:4658-4663; Deltcheva et al., Nature (2011) 471:602-607; and Jinek et al., Science (2012) 337:816-821). Cas9 orthologs have been described in various species, including, but not limited to, Streptococcus pyogenes and S. thermophilus. Additional suitable Cas9 nucleases and sequences will be apparent to those of skill in the art based on this disclosure, and such Cas9 nucleases and sequences include Cas9 sequences from the organisms and loci disclosed in Chylinski et al., RNA Biology (2013) 10:5, 726-737. In some embodiments, a Cas9 nuclease has an inactive (e.g., an inactivated) DNA cleavage domain, that is, the Cas9 is a nickase.

[0064] A nuclease-inactivated Cas9 domain, or deactivated Cas9 domain, may interchangeably be referred to as a “dCas9” domain (for nuclease-“dead” Cas9). Methods for generating a Cas9 protein (or a portion thereof) having an inactive DNA cleavage domain are known (See, e.g., Jinek et al., Science (2012) 337:816-821; Qi et al., Cell (2013) 28; 152(5): 1173-83). For example, the DNA cleavage domain of Cas9 is known to include two subdomains, the HNH nuclease subdomain and the RuvCl subdomain. The HNH subdomain cleaves the strand complementary to the gRNA, whereas the RuvCl subdomain cleaves the non-complementary strand. Mutations within these subdomains can silence the nuclease activity of Cas9. For example, the mutations D10A and H840A completely inactivate the nuclease activity of S. pyogenes Cas9 (Jinek et al., Science (2012) 337:816-821; Qi et al, Cell (2013) 28; 152(5): 1173-83).

[0065] In some embodiments, the Cas9 domain is a nuclease active domain. For example, the Cas9 domain may be a Cas9 domain that cuts both strands of a duplexed nucleic acid (e.g., both strands of a duplexed DNA molecule). In some embodiments, the Cas9 domain includes an amino acid sequence that is at least 60% identical, at least 65% identical, at least 70% identical, at least 72.5% identical, at least 75% identical, at least 77.5% identical, at least 80% identical, at least 82.5% identical, at least 85% identical, at least 87.5% identical, at least 90% identical, at least 91% identical, at least 92% identical, at least 93% identical, at least 94% identical, at least 95% identical, at least 96% identical, at least 97% identical, at least 98% identical, at least 99% identical, at least 99.5% identical, or at least 99.9% identical to any one of the amino acid sequences set forth in SEQ ID NO: 10, SEQ ID NO: 11, SEQ ID NO: 12, SEQ ID NO: 13, SEQ ID NO: 14, SEQ ID NO: 15, SEQ ID NO: 16, SEQ ID NO: 17, SEQ ID NO: 18, SEQ ID NO: 19, SEQ ID NO: 20, SEQ ID NO: 21, SEQ ID NO: 22, SEQ ID NO: 23, SEQ ID NO: 24, SEQ ID NO: 25, SEQ ID NO: 26, SEQ ID NO: 27, SEQ ID NO: 28, SEQ ID NO: 29, SEQ ID NO: 30, SEQ ID NO: 31, SEQ ID NO: 32, SEQ ID NO: 33, SEQ ID NO: 34, SEQ ID NO: 35, SEQ ID NO: 36, SEQ ID NO: 37, SEQ ID NO: 38, SEQ ID NO: 39, SEQ ID NO: 40, SEQ ID NO: 41, SEQ ID NO: 42, SEQ ID NO: 43, SEQ ID NO: 44, SEQ ID NO: 45, SEQ ID NO: 46, SEQ ID NO: 47, SEQ ID NO: 48, SEQ ID NO: 49, SEQ ID NO: 50, SEQ ID NO: 51, SEQ ID NO: 52, SEQ ID NO: 53, SEQ ID NO: 54, SEQ ID NO: 55, SEQ ID NO: 56, SEQ ID NO: 57, SEQ ID NO: 58, SEQ ID NO: 59, SEQ ID NO: 60, SEQ ID NO: 61, SEQ ID NO: 62, SEQ ID NO: 63, SEQ ID NO: 64, SEQ ID NO: 65, SEQ ID NO: 66, SEQ ID NO: 67, SEQ ID NO: 68, SEQ ID NO: 69, SEQ ID NO: 70, SEQ ID NO: 71, SEQ ID NO: 72, SEQ ID NO: 73, SEQ ID NO: 74, SEQ ID NO: 75, SEQ ID NO: 76, SEQ ID NO: 77, SEQ ID NO: 78, SEQ ID NO: 79, SEQ ID NO: 80, SEQ ID NO: 81, SEQ ID NO: 82, SEQ ID NO: 83, SEQ ID NO: 84, SEQ ID NO: 85, SEQ ID NO: 86, SEQ ID NO: 87, SEQ ID NO: 88, SEQ ID NO: 89, SEQ ID NO: 90, SEQ ID NO: 91, SEQ ID NO: 92, SEQ ID NO: 93, SEQ ID NO: 94, SEQ ID NO: 95, SEQ ID NO: 96, SEQ ID NO: 97, SEQ ID NO: 98, SEQ ID NO: 99, SEQ ID NO: 100, SEQ ID NO: 101, SEQ ID NO: 102, SEQ ID NO: 103, SEQ ID NO: 104, SEQ ID NO: 105, SEQ ID NO: 106, SEQ ID NO: 107, SEQ ID NO: 108, SEQ ID NO: 109, SEQ ID NO: 110, SEQ ID NO: 111, SEQ ID NO: 112, SEQ ID NO: 113, SEQ ID NO: 114, SEQ ID NO: 115, SEQ ID NO: 116, SEQ ID NO: 117, SEQ ID NO: 118, SEQ ID NO: 119, SEQ ID NO: 120, SEQ ID NO: 121, SEQ ID NO: 122, SEQ ID NO: 123, SEQ ID NO: 124, SEQ ID NO: 125, SEQ ID NO: 126, SEQ ID NO: 127, SEQ ID NO: 128, SEQ ID NO: 129, SEQ ID NO: 130, SEQ ID NO: 131, SEQ ID NO: 132, SEQ ID NO: 133, SEQ ID NO: 134, SEQ ID NO: 135, SEQ ID NO: 136, SEQ ID NO: 137, SEQ ID NO: 138, SEQ ID NO: 139, SEQ ID NO: 140, SEQ ID NO: 141, SEQ ID NO: 142, SEQ ID NO: 143, SEQ ID NO: 144, SEQ ID NO: 145, SEQ ID NO: 146, SEQ ID NO: 147, SEQ ID NO: 148, SEQ ID NO: 149, SEQ ID NO: 150, SEQ ID NO: 151, SEQ ID NO: 152, SEQ ID NO: 153, SEQ ID NO: 154, SEQ ID NO: 155, SEQ ID NO: 156, SEQ ID NO: 157, SEQ ID NO: 158, SEQ ID NO: 159, SEQ ID NO: 160, SEQ ID NO: 161, SEQ ID NO: 162, SEQ ID NO: 163, SEQ ID NO: 164, SEQ ID NO: 165, SEQ ID NO: 166, SEQ ID NO: 167, SEQ ID NO: 168, SEQ ID NO: 169, SEQ ID NO: 170, SEQ ID NO: 171, SEQ ID NO: 172, SEQ ID NO: 173, SEQ ID NO: 174, SEQ ID NO: 175, SEQ ID NO: 176, SEQ ID NO: 177, SEQ ID NO: 178, SEQ ID NO: 179, SEQ ID NO: 180, SEQ ID NO: 181, SEQ ID NO: 182, SEQ ID NO: 183, SEQ ID NO: 184, SEQ ID NO: 185, SEQ ID NO: 186, SEQ ID NO: 187, SEQ ID NO: 188, SEQ ID NO: 189, SEQ ID NO: 190, SEQ ID NO: 191, SEQ ID NO: 192, SEQ ID NO: 193, SEQ ID NO: 194, SEQ ID NO: 195, SEQ ID NO: 196, SEQ ID NO: 197, SEQ ID NO: 198, SEQ ID NO: 199, SEQ ID NO: 200, SEQ ID NO: 201, SEQ ID NO: 202, SEQ ID NO: 203, SEQ ID NO: 204, SEQ ID NO: 205, SEQ ID NO: 206, SEQ ID NO: 207, SEQ ID NO: 208, SEQ ID NO: 209, SEQ ID NO: 210, SEQ ID NO: 211, SEQ ID NO: 212, SEQ ID NO: 213, SEQ ID NO: 214, SEQ ID NO: 215, SEQ ID NO: 216, SEQ ID NO: 217, SEQ ID NO: 218, SEQ ID NO: 219, SEQ ID NO: 220, SEQ ID NO: 221, SEQ ID NO: 222, SEQ ID NO: 223, SEQ ID NO: 224, SEQ ID NO: 225, SEQ ID NO: 226, SEQ ID NO: 227, SEQ ID NO: 228, SEQ ID NO: 229, SEQ ID NO: 230, SEQ ID NO: 231, SEQ ID NO: 232, SEQ ID NO: 233, SEQ ID NO: 234, SEQ ID NO: 235, SEQ ID NO: 236, SEQ ID NO: 237, SEQ ID NO: 238, SEQ ID NO: 239, SEQ ID NO: 240, SEQ ID NO: 241, SEQ ID NO: 242, SEQ ID NO: 243, SEQ ID NO: 244, SEQ ID NO: 245, SEQ ID NO: 246, SEQ ID NO: 247, SEQ ID NO: 248, SEQ ID NO: 249, SEQ ID NO: 250, SEQ ID NO: 251, SEQ ID NO: 252, SEQ ID NO: 253, SEQ ID NO: 254, SEQ ID NO: 255, SEQ ID NO: 256, SEQ ID NO: 257, SEQ ID NO: 258, SEQ ID NO: 259, SEQ ID NO: 260, SEQ ID NO: 261, SEQ ID NO: 262, or SEQ ID NO: 263. In some embodiments, the Cas9 domain includes any one of the amino acid sequences as set forth in SEQ ID NO: 10, SEQ ID NO: 11, SEQ ID NO: 12, SEQ ID NO: 13, SEQ ID NO: 14, SEQ ID NO: 15, SEQ ID NO: 16, SEQ ID NO: 17, SEQ ID NO: 18, SEQ ID NO: 19, SEQ ID NO: 20, SEQ ID NO: 21, SEQ ID NO: 22, SEQ ID NO: 23, SEQ ID NO: 24, SEQ ID NO: 25, SEQ ID NO: 26, SEQ ID NO: 27, SEQ ID NO: 28, SEQ ID NO: 29, SEQ ID NO: 30, SEQ ID NO: 31, SEQ ID NO: 32, SEQ ID NO: 33, SEQ ID NO: 34, SEQ ID NO: 35, SEQ ID NO: 36, SEQ ID NO: 37, SEQ ID NO: 38, SEQ ID NO: 39, SEQ ID NO: 40, SEQ ID NO: 41, SEQ ID NO: 42, SEQ ID NO: 43, SEQ ID NO: 44, SEQ ID NO: 45, SEQ ID NO: 46, SEQ ID NO: 47, SEQ ID NO: 48, SEQ ID NO: 49, SEQ ID NO: 50, SEQ ID NO: 51, SEQ ID NO: 52, SEQ ID NO: 53, SEQ ID NO: 54, SEQ ID NO: 55, SEQ ID NO: 56, SEQ ID NO: 57, SEQ ID NO: 58, SEQ ID NO: 59, SEQ ID NO: 60, SEQ ID NO: 61, SEQ ID NO: 62, SEQ ID NO: 63, SEQ ID NO: 64, SEQ ID NO: 65, SEQ ID NO: 66, SEQ ID NO: 67, SEQ ID NO: 68, SEQ ID NO: 69, SEQ ID NO: 70, SEQ ID NO: 71, SEQ ID NO: 72, SEQ ID NO: 73, SEQ ID NO: 74, SEQ ID NO: 75, SEQ ID NO: 76, SEQ ID NO: 77, SEQ ID NO: 78, SEQ ID NO: 79, SEQ ID NO: 80, SEQ ID NO: 81, SEQ ID NO: 82, SEQ ID NO: 83, SEQ ID NO: 84, SEQ ID NO: 85, SEQ ID NO: 86, SEQ ID NO: 87, SEQ ID NO: 88, SEQ ID NO: 89, SEQ ID NO: 90, SEQ ID NO: 91, SEQ ID NO: 92, SEQ ID NO: 93, SEQ ID NO: 94, SEQ ID NO: 95, SEQ ID NO: 96, SEQ ID NO: 97, SEQ ID NO: 98, SEQ ID NO: 99, SEQ ID NO: 100, SEQ ID NO: 101, SEQ ID NO: 102, SEQ ID NO: 103, SEQ ID NO: 104, SEQ ID NO: 105, SEQ ID NO: 106, SEQ ID NO: 107, SEQ ID NO: 108, SEQ ID NO: 109, SEQ ID NO: 110, SEQ ID NO: 111, SEQ ID NO: 112, SEQ ID NO: 113, SEQ ID NO: 114, SEQ ID NO: 115, SEQ ID NO: 116, SEQ ID NO: 117, SEQ ID NO: 118, SEQ ID NO: 119, SEQ ID NO: 120, SEQ ID NO: 121, SEQ ID NO: 122, SEQ ID NO: 123, SEQ ID NO: 124, SEQ ID NO: 125, SEQ ID NO: 126, SEQ ID NO: 127, SEQ ID NO: 128, SEQ ID NO: 129, SEQ ID NO: 130, SEQ ID NO: 131, SEQ ID NO: 132, SEQ ID NO: 133, SEQ ID NO: 134, SEQ ID NO: 135, SEQ ID NO: 136, SEQ ID NO: 137, SEQ ID NO: 138, SEQ ID NO: 139, SEQ ID NO: 140, SEQ ID NO: 141, SEQ ID NO: 142, SEQ ID NO: 143, SEQ ID NO: 144, SEQ ID NO: 145, SEQ ID NO: 146, SEQ ID NO: 147, SEQ ID NO: 148, SEQ ID NO: 149, SEQ ID NO: 150, SEQ ID NO: 151, SEQ ID NO: 152, SEQ ID NO: 153, SEQ ID NO: 154, SEQ ID NO: 155, SEQ ID NO: 156, SEQ ID NO: 157, SEQ ID NO: 158, SEQ ID NO: 159, SEQ ID NO: 160, SEQ ID NO: 161, SEQ ID NO: 162, SEQ ID NO: 163, SEQ ID NO: 164, SEQ ID NO: 165, SEQ ID NO: 166, SEQ ID NO: 167, SEQ ID NO: 168, SEQ ID NO: 169, SEQ ID NO: 170, SEQ ID NO: 171, SEQ ID NO: 172, SEQ ID NO: 173, SEQ ID NO: 174, SEQ ID NO: 175, SEQ ID NO: 176, SEQ ID NO: 177, SEQ ID NO: 178, SEQ ID NO: 179, SEQ ID NO: 180, SEQ ID NO: 181, SEQ ID NO: 182, SEQ ID NO: 183, SEQ ID NO: 184, SEQ ID NO: 185, SEQ ID NO: 186, SEQ ID NO: 187, SEQ ID NO: 188, SEQ ID NO: 189, SEQ ID NO: 190, SEQ ID NO: 191, SEQ ID NO: 192, SEQ ID NO: 193, SEQ ID NO: 194, SEQ ID NO: 195, SEQ ID NO: 196, SEQ ID NO: 197, SEQ ID NO: 198, SEQ ID NO: 199, SEQ ID NO: 200, SEQ ID NO: 201, SEQ ID NO: 202, SEQ ID NO: 203, SEQ ID NO: 204, SEQ ID NO: 205, SEQ ID NO: 206, SEQ ID NO: 207, SEQ ID NO: 208, SEQ ID NO: 209, SEQ ID NO: 210, SEQ ID NO: 211, SEQ ID NO: 212, SEQ ID NO: 213, SEQ ID NO: 214, SEQ ID NO: 215, SEQ ID NO: 216, SEQ ID NO: 217, SEQ ID NO: 218, SEQ ID NO: 219, SEQ ID NO: 220, SEQ ID NO: 221, SEQ ID NO: 222, SEQ ID NO: 223, SEQ ID NO: 224, SEQ ID NO: 225, SEQ ID NO: 226, SEQ ID NO: 227, SEQ ID NO: 228, SEQ ID NO: 229, SEQ ID NO: 230, SEQ ID NO: 231, SEQ ID NO: 232, SEQ ID NO: 233, SEQ ID NO: 234, SEQ ID NO: 235, SEQ ID NO: 236, SEQ ID NO: 237, SEQ ID NO: 238, SEQ ID NO: 239, SEQ ID NO: 240, SEQ ID NO: 241, SEQ ID NO: 242, SEQ ID NO: 243, SEQ ID NO: 244, SEQ ID NO: 245, SEQ ID NO: 246, SEQ ID NO: 247, SEQ ID NO: 248, SEQ ID NO: 249, SEQ ID NO: 250, SEQ ID NO: 251, SEQ ID NO: 252, SEQ ID NO: 253, SEQ ID NO: 254, SEQ ID NO: 255, SEQ ID NO: 256, SEQ ID NO: 257, SEQ ID NO: 258, SEQ ID NO: 259, SEQ ID NO: 260, SEQ ID NO: 261, SEQ ID NO: 262, or SEQ ID NO: 263. In some embodiments, the Cas9 domain includes an amino acid sequence that has 1 or more, 2 or more, 3 or more, 4 or more, 5 or more, 6 or more, 7 or more, 8 or more, 9 or more, 10 or more, 11 or more, 12 or more, 13 or more, 14 or more, 15 or more, 16 or more, 17 or more, 18 or more, 19 or more, 20 or more, 21 or more, 22 or more, 23 or more, 24 or more, 25 or more, 26 or more, 27 or more, 28 or more, 29 or more, 30 or more, 31 or more, 32 or more, 33 or more, 34 or more, 35 or more, 36 or more, 37 or more, 38 or more, 39 or more, 40 or more, 41 or more, 42 or more, 43 or more, 44 or more, 45 or more, 46 or more, 47 or more, 48 or more, 49 or more, or 50 or more mutations compared to any one of the amino acid sequences set forth in SEQ ID NO: 10, SEQ ID NO: 11, SEQ ID NO: 12, SEQ ID NO: 13, SEQ ID NO: 14, SEQ ID NO: 15, SEQ ID NO: 16, SEQ ID NO: 17, SEQ ID NO: 18, SEQ ID NO: 19, SEQ ID NO: 20, SEQ ID NO: 21, SEQ ID NO: 22, SEQ ID NO: 23, SEQ ID NO: 24, SEQ ID NO: 25, SEQ ID NO: 26, SEQ ID NO: 27, SEQ ID NO: 28, SEQ ID NO: 29, SEQ ID NO: 30, SEQ ID NO: 31, SEQ ID NO: 32, SEQ ID NO: 33, SEQ ID NO: 34, SEQ ID NO: 35, SEQ ID NO: 36, SEQ ID NO: 37, SEQ ID NO: 38, SEQ ID NO: 39, SEQ ID NO: 40, SEQ ID NO: 41, SEQ ID NO: 42, SEQ ID NO: 43, SEQ ID NO: 44, SEQ ID NO: 45, SEQ ID NO: 46, SEQ ID NO: 47, SEQ ID NO: 48, SEQ ID NO: 49, SEQ ID NO: 50, SEQ ID NO: 51, SEQ ID NO: 52, SEQ ID NO: 53, SEQ ID NO: 54, SEQ ID NO: 55, SEQ ID NO: 56, SEQ ID NO: 57, SEQ ID NO: 58, SEQ ID NO: 59, SEQ ID NO: 60, SEQ ID NO: 61, SEQ ID NO: 62, SEQ ID NO: 63, SEQ ID NO: 64, SEQ ID NO: 65, SEQ ID NO: 66, SEQ ID NO: 67, SEQ ID NO: 68, SEQ ID NO: 69, SEQ ID NO: 70, SEQ ID NO: 71, SEQ ID NO: 72, SEQ ID NO: 73, SEQ ID NO: 74, SEQ ID NO: 75, SEQ ID NO: 76, SEQ ID NO: 77, SEQ ID NO: 78, SEQ ID NO: 79, SEQ ID NO: 80, SEQ ID NO: 81, SEQ ID NO: 82, SEQ ID NO: 83, SEQ ID NO: 84, SEQ ID NO: 85, SEQ ID NO: 86, SEQ ID NO: 87, SEQ ID NO: 88, SEQ ID NO: 89, SEQ ID NO: 90, SEQ ID NO: 91, SEQ ID NO: 92, SEQ ID NO: 93, SEQ ID NO: 94, SEQ ID NO: 95, SEQ ID NO: 96, SEQ ID NO: 97, SEQ ID NO: 98, SEQ ID NO: 99, SEQ ID NO: 100, SEQ ID NO: 101, SEQ ID NO: 102, SEQ ID NO: 103, SEQ ID NO: 104, SEQ ID NO: 105, SEQ ID NO: 106, SEQ ID NO: 107, SEQ ID NO: 108, SEQ ID NO: 109, SEQ ID NO: 110, SEQ ID NO: 111, SEQ ID NO: 112, SEQ ID NO: 113, SEQ ID NO: 114, SEQ ID NO: 115, SEQ ID NO: 116, SEQ ID NO: 117, SEQ ID NO: 118, SEQ ID NO: 119, SEQ ID NO: 120, SEQ ID NO: 121, SEQ ID NO: 122, SEQ ID NO: 123, SEQ ID NO: 124, SEQ ID NO: 125, SEQ ID NO: 126, SEQ ID NO: 127, SEQ ID NO: 128, SEQ ID NO: 129, SEQ ID NO: 130, SEQ ID NO: 131, SEQ ID NO: 132, SEQ ID NO: 133, SEQ ID NO: 134, SEQ ID NO: 135, SEQ ID NO: 136, SEQ ID NO: 137, SEQ ID NO: 138, SEQ ID NO: 139, SEQ ID NO: 140, SEQ ID NO: 141, SEQ ID NO: 142, SEQ ID NO: 143, SEQ ID NO: 144, SEQ ID NO: 145, SEQ ID NO: 146, SEQ ID NO: 147, SEQ ID NO: 148, SEQ ID NO: 149, SEQ ID NO: 150, SEQ ID NO: 151, SEQ ID NO: 152, SEQ ID NO: 153, SEQ ID NO: 154, SEQ ID NO: 155, SEQ ID NO: 156, SEQ ID NO: 157, SEQ ID NO: 158, SEQ ID NO: 159, SEQ ID NO: 160, SEQ ID NO: 161, SEQ ID NO: 162, SEQ ID NO: 163, SEQ ID NO: 164, SEQ ID NO: 165, SEQ ID NO: 166, SEQ ID NO: 167, SEQ ID NO: 168, SEQ ID NO: 169, SEQ ID NO: 170, SEQ ID NO: 171, SEQ ID NO: 172, SEQ ID NO: 173, SEQ ID NO: 174, SEQ ID NO: 175, SEQ ID NO: 176, SEQ ID NO: 177, SEQ ID NO: 178, SEQ ID NO: 179, SEQ ID NO: 180, SEQ ID NO: 181, SEQ ID NO: 182, SEQ ID NO: 183, SEQ ID NO: 184, SEQ ID NO: 185, SEQ ID NO: 186, SEQ ID NO: 187, SEQ ID NO: 188, SEQ ID NO: 189, SEQ ID NO: 190, SEQ ID NO: 191, SEQ ID NO: 192, SEQ ID NO: 193, SEQ ID NO: 194, SEQ ID NO: 195, SEQ ID NO: 196, SEQ ID NO: 197, SEQ ID NO: 198, SEQ ID NO: 199, SEQ ID NO: 200, SEQ ID NO: 201, SEQ ID NO: 202, SEQ ID NO: 203, SEQ ID NO: 204, SEQ ID NO: 205, SEQ ID NO: 206, SEQ ID NO: 207, SEQ ID NO: 208, SEQ ID NO: 209, SEQ ID NO: 210, SEQ ID NO: 211, SEQ ID NO: 212, SEQ ID NO: 213, SEQ ID NO: 214, SEQ ID NO: 215, SEQ ID NO: 216, SEQ ID NO: 217, SEQ ID NO: 218, SEQ ID NO: 219, SEQ ID NO: 220, SEQ ID NO: 221, SEQ ID NO: 222, SEQ ID NO: 223, SEQ ID NO: 224, SEQ ID NO: 225, SEQ ID NO: 226, SEQ ID NO: 227, SEQ ID NO: 228, SEQ ID NO: 229, SEQ ID NO: 230, SEQ ID NO: 231, SEQ ID NO: 232, SEQ ID NO: 233, SEQ ID NO: 234, SEQ ID NO: 235, SEQ ID NO: 236, SEQ ID NO: 237, SEQ ID NO: 238, SEQ ID NO: 239, SEQ ID NO: 240, SEQ ID NO: 241, SEQ ID NO: 242, SEQ ID NO: 243, SEQ ID NO: 244, SEQ ID NO: 245, SEQ ID NO: 246, SEQ ID NO: 247, SEQ ID NO: 248, SEQ ID NO: 249, SEQ ID NO: 250, SEQ ID NO: 251, SEQ ID NO: 252, SEQ ID NO: 253, SEQ ID NO: 254, SEQ ID NO: 255, SEQ ID NO: 256, SEQ ID NO: 257, SEQ ID NO: 258, SEQ ID NO: 259, SEQ ID NO: 260, SEQ ID NO: 261, SEQ ID NO: 262, or SEQ ID NO: 263. In some embodiments, the Cas9 domain includes an amino acid sequence that has at least 10, at least 15, at least 20, at least 30, at least 40, at least 50, at least 60, at least 70, at least 80, at least 90, at least 100, at least 150, at least 200, at least 250, at least 300, at least 350, at least 400, at least 500, at least 600, at least 700, at least 800, at least 900, at least 1000, at least 1100, or at least 1200 identical contiguous amino acid residues as compared to any one of the amino acid sequences set forth in SEQ ID NO: 10, SEQ ID NO: 11, SEQ ID NO: 12, SEQ ID NO: 13, SEQ ID NO: 14, SEQ ID NO: 15, SEQ ID NO: 16, SEQ ID NO: 17, SEQ ID NO: 18, SEQ ID NO: 19, SEQ ID NO: 20, SEQ ID NO: 21, SEQ ID NO: 22, SEQ ID NO: 23, SEQ ID NO: 24, SEQ ID NO: 25, SEQ ID NO: 26, SEQ ID NO: 27, SEQ ID NO: 28, SEQ ID NO: 29, SEQ ID NO: 30, SEQ ID NO: 31, SEQ ID NO: 32, SEQ ID NO: 33, SEQ ID NO: 34, SEQ ID NO: 35, SEQ ID NO: 36, SEQ ID NO: 37, SEQ ID NO: 38, SEQ ID NO: 39, SEQ ID NO: 40, SEQ ID NO: 41, SEQ ID NO: 42, SEQ ID NO: 43, SEQ ID NO: 44, SEQ ID NO: 45, SEQ ID NO: 46, SEQ ID NO: 47, SEQ ID NO: 48, SEQ ID NO: 49, SEQ ID NO: 50, SEQ ID NO: 51, SEQ ID NO: 52, SEQ ID NO: 53, SEQ ID NO: 54, SEQ ID NO: 55, SEQ ID NO: 56, SEQ ID NO: 57, SEQ ID NO: 58, SEQ ID NO: 59, SEQ ID NO: 60, SEQ ID NO: 61, SEQ ID NO: 62, SEQ ID NO: 63, SEQ ID NO: 64, SEQ ID NO: 65, SEQ ID NO: 66, SEQ ID NO: 67, SEQ ID NO: 68, SEQ ID NO: 69, SEQ ID NO: 70, SEQ ID NO: 71, SEQ ID NO: 72, SEQ ID NO: 73, SEQ ID NO: 74, SEQ ID NO: 75, SEQ ID NO: 76, SEQ ID NO: 77, SEQ ID NO: 78, SEQ ID NO: 79, SEQ ID NO: 80, SEQ ID NO: 81, SEQ ID NO: 82, SEQ ID NO: 83, SEQ ID NO: 84, SEQ ID NO: 85, SEQ ID NO: 86, SEQ ID NO: 87, SEQ ID NO: 88, SEQ ID NO: 89, SEQ ID NO: 90, SEQ ID NO: 91, SEQ ID NO: 92, SEQ ID NO: 93, SEQ ID NO: 94, SEQ ID NO: 95, SEQ ID NO: 96, SEQ ID NO: 97, SEQ ID NO: 98, SEQ ID NO: 99, SEQ ID NO: 100, SEQ ID NO: 101, SEQ ID NO: 102, SEQ ID NO: 103, SEQ ID NO: 104, SEQ ID NO: 105, SEQ ID NO: 106, SEQ ID NO: 107, SEQ ID NO: 108, SEQ ID NO: 109, SEQ ID NO: 110, SEQ ID NO: 111, SEQ ID NO: 112, SEQ ID NO: 113, SEQ ID NO: 114, SEQ ID NO: 115, SEQ ID NO: 116, SEQ ID NO: 117, SEQ ID NO: 118, SEQ ID NO: 119, SEQ ID NO: 120, SEQ ID NO: 121, SEQ ID NO: 122, SEQ ID NO: 123, SEQ ID NO: 124, SEQ ID NO: 125, SEQ ID NO: 126, SEQ ID NO: 127, SEQ ID NO: 128, SEQ ID NO: 129, SEQ ID NO: 130, SEQ ID NO: 131, SEQ ID NO: 132, SEQ ID NO: 133, SEQ ID NO: 134, SEQ ID NO: 135, SEQ ID NO: 136, SEQ ID NO: 137, SEQ ID NO: 138, SEQ ID NO: 139, SEQ ID NO: 140, SEQ ID NO: 141, SEQ ID NO: 142, SEQ ID NO: 143, SEQ ID NO: 144, SEQ ID NO: 145, SEQ ID NO: 146, SEQ ID NO: 147, SEQ ID NO: 148, SEQ ID NO: 149, SEQ ID NO: 150, SEQ ID NO: 151, SEQ ID NO: 152, SEQ ID NO: 153, SEQ ID NO: 154, SEQ ID NO: 155, SEQ ID NO: 156, SEQ ID NO: 157, SEQ ID NO: 158, SEQ ID NO: 159, SEQ ID NO: 160, SEQ ID NO: 161, SEQ ID NO: 162, SEQ ID NO: 163, SEQ ID NO: 164, SEQ ID NO: 165, SEQ ID NO: 166, SEQ ID NO: 167, SEQ ID NO: 168, SEQ ID NO: 169, SEQ ID NO: 170, SEQ ID NO: 171, SEQ ID NO: 172, SEQ ID NO: 173, SEQ ID NO: 174, SEQ ID NO: 175, SEQ ID NO: 176, SEQ ID NO: 177, SEQ ID NO: 178, SEQ ID NO: 179, SEQ ID NO: 180, SEQ ID NO: 181, SEQ ID NO: 182, SEQ ID NO: 183, SEQ ID NO: 184, SEQ ID NO: 185, SEQ ID NO: 186, SEQ ID NO: 187, SEQ ID NO: 188, SEQ ID NO: 189, SEQ ID NO: 190, SEQ ID NO: 191, SEQ ID NO: 192, SEQ ID NO: 193, SEQ ID NO: 194, SEQ ID NO: 195, SEQ ID NO: 196, SEQ ID NO: 197, SEQ ID NO: 198, SEQ ID NO: 199, SEQ ID NO: 200, SEQ ID NO: 201, SEQ ID NO: 202, SEQ ID NO: 203, SEQ ID NO: 204, SEQ ID NO: 205, SEQ ID NO: 206, SEQ ID NO: 207, SEQ ID NO: 208, SEQ ID NO: 209, SEQ ID NO: 210, SEQ ID NO: 211, SEQ ID NO: 212, SEQ ID NO: 213, SEQ ID NO: 214, SEQ ID NO: 215, SEQ ID NO: 216, SEQ ID NO: 217, SEQ ID NO: 218, SEQ ID NO: 219, SEQ ID NO: 220, SEQ ID NO: 221, SEQ ID NO: 222, SEQ ID NO: 223, SEQ ID NO: 224, SEQ ID NO: 225, SEQ ID NO: 226, SEQ ID NO: 227, SEQ ID NO: 228, SEQ ID NO: 229, SEQ ID NO: 230, SEQ ID NO: 231, SEQ ID NO: 232, SEQ ID NO: 233, SEQ ID NO: 234, SEQ ID NO: 235, SEQ ID NO: 236, SEQ ID NO: 237, SEQ ID NO: 238, SEQ ID NO: 239, SEQ ID NO: 240, SEQ ID NO: 241, SEQ ID NO: 242, SEQ ID NO: 243, SEQ ID NO: 244, SEQ ID NO: 245, SEQ ID NO: 246, SEQ ID NO: 247, SEQ ID NO: 248, SEQ ID NO: 249, SEQ ID NO: 250, SEQ ID NO: 251, SEQ ID NO: 252, SEQ ID NO: 253, SEQ ID NO: 254, SEQ ID NO: 255, SEQ ID NO: 256, SEQ ID NO: 257, SEQ ID NO: 258, SEQ ID NO: 259, SEQ ID NO: 260, SEQ ID NO: 261, SEQ ID NO: 262, or SEQ ID NO: 263.

[0066] In some embodiments, the Cas9 domain is a nuclease inactive Cas9 domain (dCas9). For example, the dCas9 domain may bind to a duplexed nucleic acid molecule (e.g., via a gRNA molecule) without cleaving either strand of the duplexed nucleic acid molecule. In some embodiments, dCas9 corresponds to, in part or in whole, a Cas9 amino acid sequence having one or more mutations that inactivate the Cas9 nuclease activity. For example, in some embodiments, a dCas9 domain includes a D10A and/or a H840A mutation (SEQ ID NO: 9). In some embodiments, the nuclease inactive dCas9 domain includes a DIOX mutation and a H840X mutation of the amino acid sequence set forth in SEQ ID NO: 10, or a corresponding mutation in any of the Cas9 sequences provided herein, wherein X is any amino acid change. In some embodiments, the nuclease inactive dCas9 domain includes a D10A mutation and a H840A mutation of the amino acid sequence set forth in SEQ ID NO: 10, or a corresponding mutation in any of the Cas9 sequences provided herein. As one example, a nuclease inactive Cas9 domain includes the amino acid sequence set forth in SEQ ID NO: 263 (Cloning vector pPlatTET-gRNA2, Accession No. BAV54124; see, e.g., Qi et al., Cell (2013) 152(5): 1173-83).

[0067] In other embodiments, dCas9 variants having mutations other than D10A and H840A are provided, which, e.g., result in nuclease inactivated Cas9 (dCas9). Such mutations, by way of example, include other amino acid substitutions at D10 and H820, or other substitutions within the nuclease domains of Cas9 (e.g., substitutions in the UNH nuclease subdomain and/or the RuvCl subdomain). In some embodiments, variants or homologues of dCas9 (e.g., variants of SEQ ID NO: 10) are provided which are at least 70% identical, at least 72.5% identical, at least 75% identical, at least 77.5% identical, at least 80% identical, at least 82.5% identical, at least 85% identical, at least 87.5% identical, at least 90% identical, at least 91% identical, at least 92% identical, at least 93% identical, at least 94% identical, at least 95% identical, at least 96% identical, at least 97% identical, at least 98% identical, at least 99% identical, at least 99.5% identical, or at least 99.9% identical to SEQ ID NO: 10. In some embodiments, variants of dCas9 (e.g., variants of SEQ ID NO: 10) are provided having amino acid sequences which are shorter or longer than SEQ ID NO: 10 by about 5 or more, by about or more, by about 15 or more, by about 20 or more, by about 25 or more, by about 30 or more, by about 40 or more, by about 50 or more, by about 75 or more, or by about 100 or more amino acids.

[0068] Additional suitable dCas9 domains will be apparent to those of skill in the art based on this disclosure and knowledge in the field, and are within the scope of this disclosure. Such additional exemplary suitable dCas9 domains include, but are not limited to, D10A/H840A, D10A/D839A/H840A, and D10A/D839A/H840A/N863A mutant domains (See, e.g., Prashant et al., Nat Biotechnol (2013) 31(9): 833-838). In some embodiments, the dCas9 domain includes an amino acid sequence that is at least 60% identical, at least 65% identical, at least 70% identical, at least 72.5% identical, at least 75% identical, at least 77.5% identical, at least 80% identical, at least 82.5% identical, at least 85% identical, at least 87.5% identical, at least 90% identical, at least 91% identical, at least 92% identical, at least 93% identical, at least 94% identical, at least 95% identical, at least 96% identical, at least 97% identical, at least 98% identical, at least 99% identical, at least 99.5% identical, or at least 99.9% identical to any one of the dCas9 domains provided herein.

[0069] In some embodiments, the Cas9 domain is a Cas9 nickase. The Cas9 nickase may be a Cas9 protein that is capable of cleaving only one strand of a duplexed nucleic acid molecule (e.g., a duplexed DNA molecule). In some embodiments, the Cas9 nickase cleaves the target strand of a duplexed nucleic acid molecule, meaning that the Cas9 nickase cleaves the strand that is base paired to (complementary to) a gRNA (e.g., an sgRNA) that is bound to the Cas9. In some embodiments, a Cas9 nickase includes a D10A mutation and has a histidine at position 840 of SEQ ID NO: 10, or a mutation in or a corresponding mutation in any of the Cas9 sequences provided herein. Without wishing to be bound by theory, the presence of the catalytic residue H840 restores the activity of the Cas9 to cleave the non-edited (e.g., non-deaminated) strand containing a G opposite the targeted C. Restoration of H840 (e.g., from A840) does not result in the cleavage of the target strand containing the C. For example, a Cas9 nickase may include the amino acid sequence as set forth in SEQ ID NO: 674. In some embodiments, a Cas9 nickase has an active UNH nuclease domain and is able to cleave the non-targeted strand of DNA, i.e., the strand bound by the gRNA. In further embodiments, a Cas9 nickase has an inactive RuvC nuclease domain and is not able to cleave the targeted strand of the DNA, i.e., the strand where base editing is desired. In some embodiments the Cas9 nickase cleaves the non-target, non-base-edited strand of a duplexed nucleic acid molecule, meaning that the Cas9 nickase cleaves the strand that is not base paired to a gRNA (e.g., an sgRNA) that is bound to the Cas9. In some embodiments, a Cas9 nickase includes an H840A mutation and has an aspartic acid residue at position 10 of SEQ ID NO: 10, or a corresponding mutation in any of the Cas9 sequences provided herein. In some embodiments the Cas9 nickase includes an amino acid sequence that is at least 60% identical, at least 65% identical, at least 70% identical, at least 72.5% identical, at least 75% identical, at least 77.5% identical, at least 80% identical, at least 82.5% identical, at least 85% identical, at least 87.5% identical, at least 90% identical, at least 91% identical, at least 92% identical, at least 93% identical, at least 94% identical, at least 95% identical, at least 96% identical, at least 97% identical, at least 98% identical, at least 99% identical, at least 99.5% identical, or at least 99.9% identical to any one of the Cas9 nickases provided herein. Additional suitable Cas9 nickases will be apparent to those of skill in the art based on this disclosure and knowledge in the field, and are within the scope of this disclosure. Cas9 nickases of the present disclosure are able to generate a single-strand DNA break (nick) at a specific location based on the gRNA-defined target sequence, leading to repair of the non-edited strand, ultimately resulting in a G to A change on the non-edited strand. Briefly, the base-editing system of the present disclosure allows the C of a C-G basepair to be deaminated to a U by a deaminase, e.g., an APOBEC deaminase. Nicking the non-edited strand, having the G, facilitates removal of the G via mismatch repair mechanisms. The npUGI of the base-editing system inhibits UDG, which prevents removal of the U.

[0070] In some embodiments, base-editing systems as provided herein include the full-length amino acid sequence of a Cas9 protein, e.g., one of the Cas9 sequences provided herein. In other embodiments, base-editing systems as provided herein do not include a full-length Cas9 sequence, but only a portion thereof. For example, in some embodiments, a base-editing system provided herein includes a portion of a Cas9 protein, wherein the portion binds crRNA and tracrRNA or sgRNA, but does not include a functional nuclease domain, e.g., the portion of the Cas9 protein includes only a truncated version of a nuclease domain or no nuclease domain at all. Exemplary amino acid sequences of suitable Cas9 domains and portions thereof are provided herein, and additional suitable sequences of Cas9 domains and portions thereof will be apparent to those of skill in the art.

[0071] In some embodiments, proteins including portions of Cas9 are provided. For example, in some embodiments, a protein includes one of two Cas9 domains: (1) the gRNA binding domain of Cas9; or (2) the DNA cleavage domain of Cas9. In some embodiments, proteins including Cas9 or portions thereof are referred to as “Cas9 variants.” A Cas9 variant shares homology to Cas9, or a portion thereof. For example, a Cas9 variant is at least 70% identical, at least 72.5% identical, at least 75% identical, at least 77.5% identical, at least 80% identical, at least 82.5% identical, at least 85% identical, at least 87.5% identical, at least 90% identical, at least 91% identical, at least 92% identical, at least 93% identical, at least 94% identical, at least 95% identical, at least 96% identical, at least 97% identical, at least 98% identical, at least 99% identical, at least 99.5% identical, or at least 99.9% identical to wild type Cas9. In some embodiments, the Cas9 variant may have 1 or more, 2 or more, 3 or more, 4 or more, 5 or more, 6 or more, 7 or more, 8 or more, 9 or more, 10 or more, 11 or more, 12 or more, 13 or more, 14 or more, 15 or more, 16 or more, 17 or more, 18 or more, 19 or more, 20 or more, 21 or more, 22 or more, 23 or more, 24 or more, 25 or more, 26 or more, 27 or more, 28 or more, 29 or more, 30 or more, 31 or more, 32 or more, 33 or more, 34 or more, 35 or more, 36 or more, 37 or more, 38 or more, 39 or more, 40 or more, 41 or more, 42 or more, 43 or more, 44 or more, 45 or more, 46 or more, 47 or more, 48 or more, 49 or more, or 50 or more amino acid changes compared to wild type Cas9. In some embodiments, the Cas9 variant includes a portion of Cas9 (e.g., a gRNA binding domain or a DNA-cleavage domain), such that the portion of the Cas9 is at least 70% identical, at least 72.5% identical, at least 75% identical, at least 77.5% identical, at least 80% identical, at least 82.5% identical, at least 85% identical, at least 87.5% identical, at least 90% identical, at least 91% identical, at least 92% identical, at least 93% identical, at least 94% identical, at least 95% identical, at least 96% identical, at least 97% identical, at least 98% identical, at least 99% identical, at least 99.5% identical, or at least 99.9% identical to the corresponding fragment of wild type Cas9. In some embodiments, the portion of Cas9 is at least 50%, at least 55%, at least 60%, at least 65%, at least 70%, at least 72.5%, at least 75%, at least 77.5%, at least 80%, at least 82.5%, at least 85%, at least 87.5%, at least 90%, at least 91%, at least 92%, at least 93%, at least 94%, at least 95%, at least 96%, at least 97%, at least 98%, at least 99%, at least 99.5%, or at least 99.9% of the amino acid length of a corresponding wild type Cas9.

[0072] In some embodiments, the Cas9 portion is at least 100 amino acids in length. In some embodiments, the Cas9 portion is at least 100, at least 150, at least 200, at least 250, at least 300, at least 350, at least 400, at least 450, at least 500, at least 550, at least 600, at least 650, at least 700, at least 750, at least 800, at least 850, at least 900, at least 950, at least 1000, at least 1050, at least 1100, at least 1150, at least 1200, at least 1250, or at least 1300 amino acids in length.

[0073] In some embodiments, wild type Cas9 corresponds to Cas9 from Streptococcus pyogenes (NCBI Reference Sequence: NC_017053. 1, SEQ ID NO: 1 (nucleotide); SEQ ID NO:2 (amino acid)). In some embodiments, wild type Cas9 corresponds to SEQ ID NO:3 (nucleotide) and/or SEQ ID NO: 4 (amino acid). In some embodiments, wild type Cas9 corresponds to Cas9 from S. pyogenes (NCBI Reference Sequence: NC_002737.2, SEQ ID NO: 8 (nucleotide); and Uniprot Reference Sequence: Q99ZW2, SEQ ID NO: 10 (amino acid).

[0074] In some embodiments, wild type Cas9 refers to Cas9 from: Corynebacterium ulcerans (NCBI Refs: NC_015683.1, NC_017317.1); Corynebacterium diphtheria (NCBI Refs: NC_016782. 1, NC_016786. 1); Spiroplasma syrphidicola (NCBI Ref: NC_021284. 1); Prevotella intermedia (NCBI Ref: NC 017861.1); Spiroplasma taiwanense (NCBI Ref: NC_021846.1); Streptococcus iniae (NCBI Ref: NC_021314.1); Belliella baltica (NCBI Ref: NC_018010.1); Psychroflexus torquis (NCBI Ref: NC_018721.1); Streptococcus thermophilus (NCBI Ref: YP_820832. 1), Listeria innocua (NCBI Ref: NP_472073.1), Campylobacter jejuni (NCBI Ref: YP 002344900. 1) or Neisseria meningitidis (NCBI Ref: YP 002342 100.1).

[0075] Some aspects of the disclosure provide Cas9 domains that have different PAM specificities. Typically, Cas9 proteins, such as Cas9 from S. pyogenes (spCas9), require a canonical NGG PAM sequence to bind a particular nucleic acid region. This may limit the ability to edit desired bases within a genome. In some embodiments, the base-editing system provided herein may need to be placed at a precise location, for example where a target base is placed within a 4 base region (e.g., a “deamination window”), which is approximately 15 bases upstream of the PAM (see, e.g., Komor et al., Nature (2016) 533, 420-424). Accordingly, in some embodiments, any of the base-editing systems provided herein may contain a Cas9 domain that is capable of binding a nucleotide sequence that does not contain a canonical (e.g., NGG) PAM sequence. Cas9 domains that bind to non-canonical PAM sequences have been described in the art and would be apparent to the skilled artisan. For example, Cas9 domains that bind non-canonical PAM sequences have been described in Kleinstiver et al., Nature (2015) 523, 481-485; and Kleinstiver et al., Nat Biotechnol (2015) 33, 1293-1298.

[0076] In some embodiments, the Cas9 domain is a Cas9 domain from S. aureus (SaCas9). In some embodiments, the SaCas9 domain is a nuclease active SaCas9, a nuclease inactive SaCas9 (SaCas9d), or a SaCas9 nickase (SaCas9n). In some embodiments, the SaCas9 includes the amino acid sequence SEQ ID NO: 1869. In some embodiments, the SaCas9 includes a N579X mutation of SEQ ID NO: 1869, or a corresponding mutation in any of the Cas9 sequences provided herein, wherein X is any amino acid except for N. In some embodiments, the SaCas9 includes a N579A mutation of SEQ ID NO: 1869, or a corresponding mutation in any of the Cas9 sequences provided herein. In some embodiments, the SaCas9 domain, the SaCas9d domain, or the SaCas9n domain can bind to a nucleic acid sequence having a non-canonical PAM. In some embodiments, the SaCas9 domain, the SaCas9d domain, or the SaCas9n domain can bind to a nucleic acid sequence having a NNGRRT PAM sequence. In some embodiments, the SaCas9 domain includes one or more of a E781X, a N967X, and a R1014X mutation of SEQ ID NO: 1869, or a corresponding mutation in any of the Cas9 sequences provided herein, wherein X is any amino acid. In some embodiments, the SaCas9 domain includes one or more of a E781K, a N967K, and a R1014H mutation of SEQ ID NO: 1869, or one or more corresponding mutation in any of the Cas9 sequences provided herein. In some embodiments, the SaCas9 domain includes a E781K, a N967K, or a R1014H mutation of SEQ ID NO: 1869, or corresponding mutations in any of the Cas9 sequences provided herein.

[0077] In some embodiments, the Cas9 domain of any of the base-editing systems provided herein includes an amino acid sequence that is at least 60% identical, at least 65% identical, at least 70% identical, at least 72.5% identical, at least 75% identical, at least 77.5% identical, at least 80% identical, at least 82.5% identical, at least 85% identical, at least 87.5% identical, at least 90% identical, at least 91% identical, at least 92% identical, at least 93% identical, at least 94% identical, at least 95% identical, at least 96% identical, at least 97% identical, at least 98% identical, at least 99% identical, at least 99.5% identical, or at least 99.9% identical to any one of SEQ ID NO: 1869, SEQ ID NO: 1870, or SEQ ID NO: 1871. In some embodiments, the Cas9 domain of any of the base-editing systems provided herein includes the amino acid sequence of any one of SEQ ID NO: 1869, SEQ ID NO: 1870, or SEQ ID NO: 1871. In some embodiments, the Cas9 domain of any of the base-editing systems provided herein includes the amino acid sequence of any one of SEQ ID NO: 1869, SEQ ID NO: 1870, or SEQ ID NO: 1871. Residue N579 of SEQ ID NO: 1869 may be mutated (e.g., to a A579) to yield a SaCas9 nickase. Residue A579 of SEQ ID NO: 1870 can be mutated from N579 to yield a SaCas9 nickase. Residue A579 of SEQ ID NO: 1871(SaKKH Cas9) may be mutated from N579) to yield a SaCas9 nickase. Residues K781, K967, and H1014 of SEQ ID NO: 1871 can be mutated from E781, N967, and R1014 to yield a SaKKH Cas9.

[0078] In some embodiments, the Cas9 domain is a Cas9 domain from S. pyogenes (SpCas9). In some embodiments, the SpCas9 domain is a nuclease active SpCas9, a nuclease inactive SpCas9 (SpCas9d), or a SpCas9 nickase (SpCas9n). In some embodiments, the SpCas9 includes the amino acid sequence SEQ ID NO: 1872. In some embodiments, the SpCas9 includes a D9X mutation of SEQ ID NO: 1872, or a corresponding mutation in any of Cas9 sequences provided herein, wherein X is any amino acid except for D. In some embodiments, the SpCas9 includes a D9A mutation of SEQ ID NO: 1872, or a corresponding mutation in any of the Cas9 sequences provided herein. In some embodiments, the SpCas9 domain, the SpCas9d domain, or the SpCas9n domain can bind to a nucleic acid sequence having a non-canonical PAM. In some embodiments, the SpCas9 domain, the SpCas9d domain, or the SpCas9n domain can bind to a nucleic acid sequence having a NGG, a NGA, or a NGCG PAM sequence. In some embodiments, the SpCas9 domain includes one or more of a D1134X, a R1334X, and a T1336X mutation of SEQ ID NO: 1872, or a corresponding mutation in any of the Cas9 sequences provided herein, wherein X is any amino acid. In some embodiments, the SpCas9 domain includes one or more of a D1134E, R1334Q, and T1336R mutation of SEQ ID NO: 1872, or a corresponding mutation in any of the Cas9 sequences provided herein. In some embodiments, the SpCas9 domain includes a D1134E, a R1334Q, and a T1336R mutation of SEQ ID NO: 1872, or corresponding mutations in any of the Cas9 sequences provided herein. In some embodiments, the SpCas9 domain includes one or more of a D1134X, a R1334X, and a T1336X mutation of SEQ ID NO: 1872, or a corresponding mutation in any of the Cas9 sequences provided herein, wherein X is any amino acid. In some embodiments, the SpCas9 domain includes one or more of a D1134V, a R1334Q, and a T1336R mutation of SEQ ID NO: 1872, or a corresponding mutation in any of Cas9 sequences provided herein. In some embodiments, the SpCas9 domain includes a D1134V, a R1334Q, and a T1336R mutation of SEQ ID NO: 1872, or corresponding mutations in any of the Cas9 sequences provided herein. In some embodiments, the SpCas9 domain includes one or more of a D1134X, a G1217X, a R1334X, and a T1336X mutation of SEQ ID NO: 1872, or a corresponding mutation in any of the Cas9 sequences provided herein, wherein X is any amino acid. In some embodiments, the SpCas9 domain includes one or more of a D1134V, a G1217R, a R1334Q, and a T1336R mutation of SEQ ID NO: 1872, or a corresponding mutation in any of the Cas9 sequences provided herein. In some embodiments, the SpCas9 domain includes a D1134V, a G1217R, a R1334Q, and a T1336R mutation of SEQ ID NO: 1872, or corresponding mutations in any of the Cas9 sequences provided herein.

[0079] In some embodiments, the Cas9 domain of any of the base-editing systems provided herein includes an amino acid sequence that is at least 60% identical, at least 65% identical, at least 70% identical, at least 72.5% identical, at least 75% identical, at least 77.5% identical, at least 80% identical, at least 82.5% identical, at least 85% identical, at least 87.5% identical, at least 90% identical, at least 91% identical, at least 92% identical, at least 93% identical, at least 94% identical, at least 95% identical, at least 96% identical, at least 97% identical, at least 98% identical, at least 99% identical, at least 99.5% identical, or at least 99.9% identical to any one of SEQ ID NO: 1872, SEQ ID NO: 1873, SEQ ID NO: 1874, SEQ ID NO: 1875, or SEQ ID NO: 1876. In some embodiments, the Cas9 domain of any of the base-editing systems provided herein includes the amino acid sequence of any one of SEQ ID NO: 1872, SEQ ID NO: 1873, SEQ ID NO: 1874, SEQ ID NO: 1875, or SEQ ID NO: 1876. In some embodiments, the Cas9 domain of any of the base-editing systems provided herein includes the amino acid sequence of any one of SEQ ID NO: 1872, SEQ ID NO: 1873, SEQ ID NO: 1874, SEQ ID NO: 1875, or SEQ ID NO: 1876. Residues E1134, Q1334, and R1336 of SEQ ID NO: 1874 can be mutated from D1134, R1334, and T1336 to yield a SpEQR Cas9. Residues V1134, Q1334, and R1336 of SEQ ID NO: 1875 can be mutated from D1134, R1334, and T1336 to yield a SpVQR Cas9. Residues V1134, R1217, Q1334, and R1336 of SEQ ID NO: 1876 can be mutated from D1134, G1217, R1334, and T1336 to yield a SpVRER Cas9.

[0080] Some aspects of the disclosure provide base-editing systems (e.g., any of the base-editing systems provided herein) including a Cas9 domain that has high fidelity. Additional aspects of the disclosure provide base-editing systems (e.g., any of the base-editing systems provided herein) including a Cas9 domain with decreased electrostatic interactions between the Cas9 domain and a sugar-phosphate backbone of a DNA, as compared to a wild-type Cas9 domain. In some embodiments, a Cas9 domain (e.g., a wild type Cas9 domain) includes one or more mutations that decreases the association between the Cas9 domain and a sugar-phosphate backbone of a DNA. In some embodiments, any of the base-editing systems provided herein include one or more of a N497X, a R661X, a Q695X, and/or a Q926X mutation of the amino acid sequence provided in SEQ ID NO: 10, or a corresponding mutation in any of the Cas9 sequences provided herein, wherein X is any amino acid. In some embodiments, any of the base-editing systems provided herein include one or more of a N497A, a R661A, a Q695A, and/or a Q926A mutation of the amino acid sequence provided in SEQ ID NO: 10, or a corresponding mutation in any of the Cas9 sequences provided herein. In some embodiments, the Cas9 domain includes a D10A mutation of the amino acid sequence provided in SEQ ID NO: 10, or a corresponding mutation in any of the Cas9 sequences provided herein. In some embodiments, the Cas9 domain (e.g., of any of the base-editing systems provided herein) includes the amino acid sequence as set forth in SEQ ID NO: 325. Cas9 domains with high fidelity are known in the art and would be apparent to the skilled artisan. For example, Cas9 domains with high fidelity have been described in Kleinstiver et al., Nature (2016) 529, 490-495; and Slaymaker et al., Science (2015) 351, 84-88.

### Cas12a Domains

[0081] Cas12a is an RNA-guided endonuclease of a class II CRISPR/Cas system. The Cas12a locus contains a mixed alpha/beta domain, a RuvC-I followed by a helical region, a RuvC-II and a zinc finger-like domain. The Cas12a protein has a RuvC-like endonuclease domain that is similar to the RuvC domain of Cas9. In contrast to Cas9, Cas12a does not have a HNH endonuclease domain, and the N-terminal of Cas12a does not have an alpha-helical recognition lobe (see, e.g., Kleinstiver et al., Nat Biotechnol. (2016) 34(8):869-74. PMID: 27347757; and Kim et al., Nat Biotechnol. (2016) 34(8):863-8. PMID: 27272384; Zetsche et al., Cell (2015) 163, 759-771. PMID: 26422227; and Shmakov et al., Mol Cell. (2015) 60(3): 385-97. PMID: 26593719).

[0082] Cas12a is an endonuclease of the new CRISPR system that is distinct from Cas9. Cas12a is relatively small in size and can act by a single 42-nt crRNA, which has 23 nt at its 3′ end that are complementary to the protospacer of the target DNA sequence. Further, Cas12a recognizes TTTN PAMs that are positioned 5′ of the protospacer. Cas12a enzymes recognize T-rich PAMs that are positioned 5′ to the spacer sequence. Cas12a has been reported to recognize a PAM of the form TTTN but strongly prefers TTTV (where V=A, C, or G). Cas12a can be programmed to edit target sites in human cells and possess robust on-target activities and high genome-wide specificities in human cells (see, e.g., Kleinstiver et al., Nat Biotechnol. (2016) 34(8):869-74. PMID: 27347757; and Kim et al., Nat Biotechnol. (2016) 34(8):863-8. PMID: 27272384; Zetsche et al., Cell (2015) 163, 759-771. PMID: 26422227; Shmakov et al., Mol Cell. (2015) 60(3): 385-97. PMID: 26593719). In some embodiments, it is of interest to make use of an engineered Cas12a domain as defined herein, such as Cas12a, wherein the Cas12a domain complexes with a nucleic acid molecule including RNA to form a CRISPR complex, wherein when in the CRISPR complex, the nucleic acid molecule targets one or more target polynucleotide loci. In certain embodiments, the Cas12a domain is modified to have increased activity, i.e. wider PAM specificity.

[0083] In some embodiments, the present disclosure relates to Cas12a domains. The term “Cas12a” or “Cas12a nuclease” refers to an RNA-guided nuclease including a Cas12a protein, or portion thereof (e.g., a protein including an active, inactive, or partially active DNA cleavage domain of Cas12a, and/or the gRNA binding domain of Cas12a). A Cas12a nuclease may also be referred to as a Cpf1 nuclease. Cas12a orthologs have been described in various species, including, but not limited to, Lachnospiraceae bacterium (LbCpf1) nuclease and Acidaminococcus sp. (AsCpf1). A nuclease-inactivated Cas12a domain, or deactivated Cas12a domain, may be referred to as a “dCas12a” domain (for nuclease “dead” Cas12a). A Cas12a variant capable of generating a single-strand DNA break (nick) may be referred to as “Cas12a nickase”, “nCas12a”, “Cpf1 nickase”, or “nCpf1.” Methods for generating a Cas12a protein, or a portion thereof, having an inactive DNA cleavage domain are known in the art. Additional suitable Cas12a nucleases and sequences will be apparent to those of skill in the art based on this disclosure.

[0084] In some embodiments, the present disclosure relates to Cas12a domains. In some embodiments, the Cas12a domain includes an amino acid sequence that is at least about 60% identical, at least about 65% identical, at least about 70% identical, at least about 72.5% identical, at least about 75% identical, at least about 77.5% identical, at least about 80% identical, at least about 82.5% identical, at least about 85% identical, at least about 87.5% identical, at least about 90% identical, at least about 91% identical, at least about 92% identical, at least about 93% identical, at least about 94% identical, at least about 95% identical, at least about 96% identical, at least about 97% identical, at least about 98% identical, at least about 99% identical, at least about 99.5% identical, or at least about 99.9% identical to any one of SEQ ID NO: 350, SEQ ID NO: 351, SEQ ID NO: 352, SEQ ID NO: 353, SEQ ID NO: 354, SEQ ID NO: 355, SEQ ID NO: 356, SEQ ID NO: 357, SEQ ID NO: 358, SEQ ID NO: 359, SEQ ID NO: 360, SEQ ID NO: 361, SEQ ID NO: 362, SEQ ID NO: 363, SEQ ID NO: 364, SEQ ID NO: 365, SEQ ID NO: 390, SEQ ID NO: 391, SEQ ID NO: 392, SEQ ID NO: 393, SEQ ID NO: 394, SEQ ID NO: 395, SEQ ID NO: 396, SEQ ID NO: 397, SEQ ID NO: 398, SEQ ID NO: 399, SEQ ID NO: 400, SEQ ID NO: 401, SEQ ID NO: 403, SEQ ID NO: 404, SEQ ID NO: 405, SEQ ID NO: 406, SEQ ID NO: 407, SEQ ID NO: 408, SEQ ID NO: 409, SEQ ID NO: 410, SEQ ID NO: 411, SEQ ID NO: 412, or SEQ ID NO: 413. In some embodiments, the Cas12a domain is SEQ ID NO: 350, SEQ ID NO: 351, SEQ ID NO: 352, SEQ ID NO: 353, SEQ ID NO: 354, SEQ ID NO: 355, SEQ ID NO: 356, SEQ ID NO: 357, SEQ ID NO: 358, SEQ ID NO: 359, SEQ ID NO: 360, SEQ ID NO: 361, SEQ ID NO: 362, SEQ ID NO: 363, SEQ ID NO: 364, SEQ ID NO: 365, SEQ ID NO: 390, SEQ ID NO: 391, SEQ ID NO: 392, SEQ ID NO: 393, SEQ ID NO: 394, SEQ ID NO: 395, SEQ ID NO: 396, SEQ ID NO: 397, SEQ ID NO: 398, SEQ ID NO: 399, SEQ ID NO: 400, SEQ ID NO: 401, SEQ ID NO: 403, SEQ ID NO: 404, SEQ ID NO: 405, SEQ ID NO: 406, SEQ ID NO: 407, SEQ ID NO: 408, SEQ ID NO: 409, SEQ ID NO: 410, SEQ ID NO: 411, SEQ ID NO: 412, or SEQ ID NO: 413. In some embodiments, the Cas12a domain includes an amino acid sequence that has 1 or more, 2 or more, 3 or more, 4 or more, 5 or more, 6 or more, 7 or more, 8 or more, 9 or more, 10 or more, 11 or more, 12 or more, 13 or more, 14 or more, 15 or more, 16 or more, 17 or more, 18 or more, 19 or more, 20 or more, 21 or more, 22 or more, 23 or more, 24 or more, 25 or more, 26 or more, 27 or more, 28 or more, 29 or more, 30 or more, 31 or more, 32 or more, 33 or more, 34 or more, 35 or more, 36 or more, 37 or more, 38 or more, 39 or more, 40 or more, 41 or more, 42 or more, 43 or more, 44 or more, 45 or more, 46 or more, 47 or more, 48 or more, 49 or more, or 50 or more mutations compared to any one of the amino acid sequences set forth in SEQ ID NO: 350, SEQ ID NO: 351, SEQ ID NO: 352, SEQ ID NO: 353, SEQ ID NO: 354, SEQ ID NO: 355, SEQ ID NO: 356, SEQ ID NO: 357, SEQ ID NO: 358, SEQ ID NO: 359, SEQ ID NO: 360, SEQ ID NO: 361, SEQ ID NO: 362, SEQ ID NO: 363, SEQ ID NO: 364, SEQ ID NO: 365, SEQ ID NO: 390, SEQ ID NO: 391, SEQ ID NO: 392, SEQ ID NO: 393, SEQ ID NO: 394, SEQ ID NO: 395, SEQ ID NO: 396, SEQ ID NO: 397, SEQ ID NO: 398, SEQ ID NO: 399, SEQ ID NO: 400, SEQ ID NO: 401, SEQ ID NO: 403, SEQ ID NO: 404, SEQ ID NO: 405, SEQ ID NO: 406, SEQ ID NO: 407, SEQ ID NO: 408, SEQ ID NO: 409, SEQ ID NO: 410, SEQ ID NO: 411, SEQ ID NO: 412, or SEQ ID NO: 413. In some embodiments, the Cas12a domain includes an amino acid sequence that has at least 10, at least 15, at least 20, at least 30, at least 40, at least 50, at least 60, at least 70, at least 80, at least 90, at least 100, at least 150, at least 200, at least 250, at least 300, at least 350, at least 400, at least 500, at least 600, at least 700, at least 800, at least 900, at least 1000, at least 1100, or at least 1200 identical contiguous amino acid residues as compared to any one of the amino acid sequences set forth in SEQ ID NO: 350, SEQ ID NO: 351, SEQ ID NO: 352, SEQ ID NO: 353, SEQ ID NO: 354, SEQ ID NO: 355, SEQ ID NO: 356, SEQ ID NO: 357, SEQ ID NO: 358, SEQ ID NO: 359, SEQ ID NO: 360, SEQ ID NO: 361, SEQ ID NO: 362, SEQ ID NO: 363, SEQ ID NO: 364, SEQ ID NO: 365, SEQ ID NO: 390, SEQ ID NO: 391, SEQ ID NO: 392, SEQ ID NO: 393, SEQ ID NO: 394, SEQ ID NO: 395, SEQ ID NO: 396, SEQ ID NO: 397, SEQ ID NO: 398, SEQ ID NO: 399, SEQ ID NO: 400, SEQ ID NO: 401, SEQ ID NO: 403, SEQ ID NO: 404, SEQ ID NO: 405, SEQ ID NO: 406, SEQ ID NO: 407, SEQ ID NO: 408, SEQ ID NO: 409, SEQ ID NO: 410, SEQ ID NO: 411, SEQ ID NO: 412, or SEQ ID NO: 413. Additional suitable Cas12a domains (e.g., from Acidaminococcus sp., Lachnospiraceae sp., or other species) will be apparent to those of skill in the art based on this disclosure and knowledge in the field, and are within the scope of this disclosure.

[0085] In some embodiments, the Cas12a domain of any of the base-editing systems provided herein is a dCas12a domain. For example, a dCas12a domain may be produced by inactivating the RuvC-like domain of Cas12a, as described in Zetsche et al., Cell (2015) 163, 759-771. PMID: 26422227. For example, mutations corresponding to D917A, E1006A, E1028A, D1227A, D1255A, or N1257A in Francisella novicida Cas12a (SEQ ID NO: 356) inactivate Cas12a nuclease activity. In some embodiments, the dCas12a includes mutations corresponding to D917A, E1006A, D1255A, D917A/E1006A, D917A/D1255A, E1006A/D1255A, or D917A/E1006A/D1255A in SEQ ID NO: 350. In some embodiments, the inactivated Cas12a domains include enzymes mutated in amino acid positions 908, 993, 1263 of AsCas12a or corresponding positions in Cas12a orthologs. More particularly, the inactivated Cas12a domains include domains including one or more of mutations D908A, E993A, D1263A of AsCas12a or corresponding mutations in Cas12a orthologs. In some embodiments, the inactivated Cas12a domains include enzymes mutated in amino acid position 832, 925, 947 or 1180 of LbCas12a or corresponding positions in Cas12a orthologs. More particularly, the inactivated Cas12a domains include domains including one or more of mutations D832A, E925A, D947A or D1180A of LbCas12a or corresponding mutations in Cas12a orthologs. Mutations can also be made at neighboring residues, e.g., at amino acids near those indicated above that participate in the nuclease activity. In some embodiments, only the RuvC domain is inactivated, while in other embodiments, another putative nuclease domain is inactivated, wherein the effector protein complex functions as a nickase and cleaves only one DNA strand. In some embodiments, the dCas12a is a nuclease inactive SEQ ID NO: 359. In some embodiments, the dCas12a includes a D832X mutation relative to SEQ ID NO: 359, wherein X is any amino acid except for D. In some embodiments, the dCas12a includes a D832A mutation relative to SEQ ID NO: 359. Additional dCas12a proteins have been described (see, e.g., Li et al., Nat. Biotech. (2018) DOI: 10.1038/nbt.4102). In some embodiments, the dCas12a includes 1, 2, or 3 of the point mutations D832A, E1006A, D1125A of the Cas12a described in Li et al., Nat. Biotech. (2018) DOI: 10.1038/nbt.4102. In some embodiments, dCas12a corresponds to, in part or in whole, a Cas12a amino acid sequence having one or more mutations that inactivate the Cas12a nuclease activity. Additional suitable dCas12a domains will be apparent to those of skill in the art based on this disclosure and knowledge in the field, and are within the scope of this disclosure. In some embodiments, the dCas12a domain includes an amino acid sequence that is at least 60% identical, at least 65% identical, at least 70% identical, at least 72.5% identical, at least 75% identical, at least 77.5% identical, at least 80% identical, at least 82.5% identical, at least 85% identical, at least 87.5% identical, at least 90% identical, at least 91% identical, at least 92% identical, at least 93% identical, at least 94% identical, at least 95% identical, at least 96% identical, at least 97% identical, at least 98% identical, at least 99% identical, at least 99.5% identical, or at least 99.9% identical to any one of the dCas12a domains provided herein. It is to be understood that any mutations, (e.g., substitution mutations, deletions, insertions, etc.) that inactivate the RuvC domain of Cas12a, may be used in accordance with the present disclosure.

[0086] In some embodiments, the Cas12a domain of any of the base-editing systems provided herein is a Cas12a nickase domain. In some embodiments, the Cas12a nickase includes a R836X mutation relative to SEQ ID NO: 359, wherein X is any amino acid except for R. In some embodiments, the Cas12a nickase includes a R836A mutation relative to SEQ ID NO: 359. In some embodiments, the Cas12a nickase includes a R1138A mutation relative to SEQ ID NO: 359. In some embodiments, the Cas12a nickase includes a R912A mutation relative to SEQ ID NO: 358. Without wishing to be bound by any particular theory, residue R836 of SEQ ID NO: 359 and residue R912 of SEQ ID NO: 358 are examples of corresponding (e.g., homologous) residues. In some embodiments, the Cas12a nickase includes a R1226A mutation relative to SEQ ID NO: 350 (AsCas12a). In some embodiments, the Cas12a nickase includes a mutation at residues R1218 relative to SEQ ID NO: 390 (FnCas12a). In some embodiments, the Cas12a nickase includes a mutation at residue R1293 relative to SEQ ID NO: 400 (MbCas12a). It will be understood by the skilled person that a mutation may be made at a residue in a corresponding position to the positions described herein in a Cas12a ortholog. In some embodiments, the Cas12a nickase may be a Cas12a protein that is capable of cleaving only one strand of a duplexed nucleic acid molecule (e.g., a duplexed DNA molecule). In some embodiments the Cas12a nickase cleaves the target strand of a duplexed nucleic acid molecule, meaning that the Cas12a nickase cleaves the strand that is base paired to (complementary to) a gRNA (e.g., an sgRNA) that is bound to the Cas12a. In some embodiments the Cas12a nickase includes an amino acid sequence that is at least 60% identical, at least 65% identical, at least 70% identical, at least 72.5% identical, at least 75% identical, at least 77.5% identical, at least 80% identical, at least 82.5% identical, at least 85% identical, at least 87.5% identical, at least 90% identical, at least 91% identical, at least 92% identical, at least 93% identical, at least 94% identical, at least 95% identical, at least 96% identical, at least 97% identical, at least 98% identical, at least 99% identical, at least 99.5% identical, or at least 99.9% identical to any one of the Cas12a nickases provided herein. In some embodiments, any of the Cas12a proteins provided herein includes one or more amino acid deletions. Additional suitable Cas12a nickases will be apparent to those of skill in the art based on this disclosure and knowledge in the field, and are within the scope of this disclosure. In some embodiments, the inactivated Cas12a or Cas12a nickase may have associated (e.g., via fusion protein) one or more functional domains, including for example, a cytidine deaminase or catalytic domain thereof. In some embodiments, the Cas12a nickase includes a Cas12a nickase that cleaves the non-target strand, as described in Yamano et al., Cell (2016) 165(4): 949-962. PMID: 27114038. Without wishing to be bound by any particular theory, Cas12a nickase cuts the target strand more efficiently than the non-target strand.

[0087] In some embodiments, the Cas12a domain of any of the base-editing systems provided herein is a modified Cas12a domain. Several small stretches of unstructured regions are predicted within the Cas12a primary structure. Without wishing to be bound by theory, unstructured regions, which are exposed to the solvent and not conserved within different Cas12a orthologs, are preferred sites for splits and insertions of small protein sequences. In addition, these sites can be used to generate chimeric proteins between Cas12a orthologs. Based on the above information, mutants can be generated which lead to inactivation of the Cas12a or which modify the double strand nuclease to nickase activity. In some embodiments, this information is used to develop Cas12a domains with reduced off-target effects. In some embodiments, any of the Cas12a domains described herein is modified by mutation of one or more residues (in the RuvC domain) including but not limited to positions R909, R912, R930, R947, K949, R951, R955, K965, K968, K1000, K1002, R1003, K1009, K1017, K1022, K1029, K1035, K1054, K1072, K1086, R1094, K1095, K1109, K1118, K1142, K1150, K1158, K1159, R1220, R1226, R1242, and/or R1252 with reference to amino acid position numbering of SEQ ID NO: 396 (AsCas12a from Acidaminococcus sp. BV3L6). In some embodiments, the Cas12a domains including said one or more mutations have modified, more preferably increased specificity for the target. In some embodiments, any of the Cas12a domains described herein is modified by mutation of one or more residues (in the RAD50) domain including but not limited to positions K324, K335, K337, R331, K369, K370, R386, R392, R393, K400, K404, K406, K408, K414, K429, K436, K438, K459, K460, K464, R670, K675, R681, K686, K689, R699, K705, R725, K729, K739, K748, and/or K752 with reference to amino acid position numbering of SEQ ID NO: 396 (AsCas12a from Acidaminococcus sp. BV3L6). In some embodiments, the Cas12a domains including said one or more mutations have modified, more preferably increased specificity for the target. In certain of the Cas12a domains, the enzyme is modified by mutation of one or more residues including but not limited to positions R912, T923, R947, K949, R951, R955, K965, K968, K1000, R1003, K1009, K1017, K1022, K1029, K1072, K1086, F1103, R1226, and/or R1252 with reference to amino acid position numbering of AsCas12a (Acidaminococcus sp. BV3L6). In certain embodiments, the Cas12a domains including said one or more mutations have modified, more preferably increased specificity for the target. In some embodiments, any of the Cas12a domains described herein is modified by mutation of one or more residues including but not limited to positions R833, R836, K847, K879, K881, R883, R887, K897, K900, K932, R935, K940, K948, K953, K960, K984, K1003, K1017, R1033, R1138, R1165, and/or R1252 with reference to amino acid position numbering of SEQ ID NO: 359 (LbCas12a from Lachnospiraceae bacterium ND2006). In certain embodiments, the Cas12a domains including said one or more mutations have modified, more preferably increased specificity for the target. Additional Cas12a mutations may be found in WO2018213726.

[0088] In some embodiments, proteins including portions of Cas12a are provided. In some embodiments, proteins including Cas12a or portions thereof are referred to as “Cas12a variants.” A Cas12a variant shares homology to Cas12a, or a portion thereof. For example, a Cas12a variant is at least 70% identical, at least 72.5% identical, at least 75% identical, at least 77.5% identical, at least 80% identical, at least 82.5% identical, at least 85% identical, at least 87.5% identical, at least 90% identical, at least 91% identical, at least 92% identical, at least 93% identical, at least 94% identical, at least 95% identical, at least 96% identical, at least 97% identical, at least 98% identical, at least 99% identical, at least 99.5% identical, or at least 99.9% identical to wild type Cas12a. In some embodiments, the Cas12a variant may have 1 or more, 2 or more, 3 or more, 4 or more, 5 or more, 6 or more, 7 or more, 8 or more, 9 or more, 10 or more, 11 or more, 12 or more, 13 or more, 14 or more, 15 or more, 16 or more, 17 or more, 18 or more, 19 or more, 20 or more, 21 or more, 22 or more, 23 or more, 24 or more, 25 or more, 26 or more, 27 or more, 28 or more, 29 or more, 30 or more, 31 or more, 32 or more, 33 or more, 34 or more, 35 or more, 36 or more, 37 or more, 38 or more, 39 or more, 40 or more, 41 or more, 42 or more, 43 or more, 44 or more, 45 or more, 46 or more, 47 or more, 48 or more, 49 or more, or 50 or more amino acid changes compared to wild type Cas12a. In some embodiments, the Cas12a variant includes a portion of Cas12a (e.g., a gRNA binding domain or a DNA-cleavage domain), such that the Cas12a portion is at least 70% identical, at least 72.5% identical, at least 75% identical, at least 77.5% identical, at least 80% identical, at least 82.5% identical, at least 85% identical, at least 87.5% identical, at least 90% identical, at least 91% identical, at least 92% identical, at least 93% identical, at least 94% identical, at least 95% identical, at least 96% identical, at least 97% identical, at least 98% identical, at least 99% identical, at least 99.5% identical, or at least 99.9% identical to the corresponding portion of wild type Cas12a. In some embodiments, the Cas12a portion is at least 50%, at least 55%, at least 60%, at least 65%, at least 70%, at least 72.5%, at least 75%, at least 77.5%, at least 80%, at least 82.5%, at least 85%, at least 87.5%, at least 90%, at least 91%, at least 92%, at least 93%, at least 94%, at least 95%, at least 96%, at least 97%, at least 98%, at least 99%, at least 99.5%, or at least 99.9% of the amino acid length of a corresponding wild type Cas12a. In some embodiments, the Cas12a portion is at least 100 amino acids in length. In some embodiments, the Cas12a portion is at least 100, at least 150, at least 200, at least 250, at least 300, at least 350, at least 400, at least 450, at least 500, at least 550, at least 600, at least 650, at least 700, at least 750, at least 800, at least 850, at least 900, at least 950, at least 1000, at least 1050, at least 1100, at least 1150, at least 1200, at least 1250, or at least 1300 amino acids in length.

[0089] In some embodiments, the Cas12a is derived from a bacterial species selected from Francisella tularensis 1, Prevotella albensis, Lachnospiraceae bacterium MC2017, Lachnospiraceae bacterium MA2020, Lachnospiraceae bacterium ND2006, Butyrivibrio proteoclasticus, Peregrinibacteria bacterium GW2011_GWA2_33_10, Parcubacteria bacterium GW2011_GWC2_44_17, Smithella sp. SCADC, Acidaminococcus sp. BV3L6, Candidatus Methanoplasma termitum, Eubacterium eligens, Moraxella bovoculi 237, Moraxella bovoculi AAX08_00205, Moraxella bovoculi AAX11_00205, Butyrivibrio sp. NC3005, Thiomicrospira sp. XS5, Leptospira inadai, Porphyromonas crevioricanis 3, Prevotella disiens and Porphyromonas macacae. In some embodiments, the Cas12a is derived from a subspecies of Francisella tularensis 1, including but not limited to Francisella tularensis subsp. novicida. In some embodiments, the Cas12a is derived from a bacterial species selected from Acidaminococcus sp. BV3L6, Lachnospiraceae bacterium ND2006, Lachnospiraceae bacterium MA2020, Moraxella bovoculi AAX08_00205, Moraxella bovoculi AAX11_00205, Butyrivibrio sp. NC3005, or Thiomicrospira sp. XS5. In some embodiments, wild type Cas12a corresponds to Cas12a from Lachnospiraceae bacterium (e.g., Lachnospiraceae bacterium ND2006, MC2017, or MA2020), i.e., SEQ ID NO: 359, SEQ ID NO: 391, or SEQ ID NO: 397. In some embodiments, wild type Cas12a corresponds to Cas12a from Acidaminococcus sp., i.e., SEQ ID NO: 350. In some embodiments, wild type Cas12a corresponds to Cas12a from Butyrivibrio proteoclasticus (BpCas12a), i.e., SEQ ID NO: 392. In some embodiments, wild type Cas12a corresponds to Cas12a from Peregrinibacteria bacterium GW2011_GWA_33_10 (PeCas12a), i.e., SEQ ID NO: 393. In some embodiments, wild type Cas12a corresponds to Cas12a from Parcubacteria bacterium GWC2011_GWC2_44_17 (PbCas12a), i.e., SEQ ID NO: 394. In some embodiments, wild type Cas12a corresponds to Cas12a from Smithella sp. SC_K08D17 (SsCas12a), i.e., SEQ ID NO: 395. In some embodiments, wild type Cas12a corresponds to Cas12a from Acidaminococcus sp. BV3L6 (AsCas12a), i.e., SEQ ID NO: 396. In some embodiments, wild type Cas12a corresponds to Cas12a from Lachnospiraceae bacterium MVA2020 (Lb2Cas12a), i.e., SEQ ID NO: 397. In some embodiments, wild type Cas12a corresponds to Cas12a from Candidatus methanoplasma termitum (CMtCas12a), i.e., SEQ ID NO: 398. In some embodiments, wild type Cas12a corresponds to Cas12a from Eubacterium eligens (EeCas12a), i.e., SEQ ID NO: 399. In some embodiments, wild type Cas12a corresponds to Cas12a from Moraxella bovoculi 237 (MbCas12a), i.e., SEQ ID NO: 400. In some embodiments, wild type Cas12a corresponds to Cas12a from Leptospira inadai (LiCas12a), i.e., SEQ ID NO: 401. In some embodiments, wild type Cas12a corresponds to Cas12a from Porphyromonas crevioricanis (PcCas12a), i.e., SEQ ID NO: 403. In some embodiments, wild type Cas12a corresponds to Cas12a from Prevotella disiens (PdCas12a), i.e., SEQ ID NO: 404. In some embodiments, wild type Cas12a corresponds to Cas12a from Porphyromonas macacae (PmCas12a), i.e., SEQ ID NO: 405. In some embodiments, wild type Cas12a corresponds to Cas12a from Thiomicrospira sp. XS5 (TsCas12a), i.e., SEQ ID NO: 406. In some embodiments, wild type Cas12a corresponds to Cas12a from Moraxella bovoculi AAX08_00205 (Mb2Cas12a), i.e., SEQ ID NO: 407. In some embodiments, wild type Cas12a corresponds to Cas12a from Moraxella bovoculi AAX11_00205 (Mb3Cas12a), i.e., SEQ ID NO: 408. In some embodiments, wild type Cas12a corresponds to Cas12a from Butyrivibrio sp. NC3005 (BsCas12a), i.e., SEQ ID NO: 409. In some embodiments, Cas12a corresponds to Cas12a ortholog NCBI WP_055225123.1, i.e., SEQ ID NO: 410. In some embodiments, Cas12a corresponds to Cas12a ortholog NCBI WP_055237260.1, 1. e., SEQ ID NO: 411. In some embodiments, Cas12a corresponds to Cas12a ortholog NCBI WP_055272206.1, i.e., SEQ ID NO: 412. In some embodiments, Cas12a corresponds to Cas12a ortholog GenBank OLA16049.1, i.e., SEQ ID NO: 413.

[0090] In some embodiments, Cas12a corresponds to a codon-optimized Cas12a from any one of the species herein. Codon-optimized Cas12a sequences may be used when the fusion protein of the present disclosure is administered as a nucleic acid. An example of a codon-optimized sequence, is for example, a sequence optimized for expression in a eukaryote (e.g., a mammal such as a human, a plant such as corn, etc.). Information regarding codon usage in different organisms is readily available. Similarly, there are a variety of tools that may be used (e.g., codon usage tables, algorithms, programs, etc.) for codon-optimizing sequences.

[0091] In some embodiments, base-editing systems as provided herein include the full-length amino acid sequence of a Cas12a protein, e.g., one of the Cas12a sequences provided herein. In other embodiments, however, base-editing systems as provided herein do not include a full-length Cas12a sequence, but only a portion thereof. For example, in some embodiments, a base-editing system provided herein includes a portion of a Cas12a protein, wherein the portion binds crRNA and tracrRNA or sgRNA, but does not include a functional nuclease domain, e.g., in that it includes only a truncated version of a nuclease domain or no nuclease domain at all. In some embodiments, any of the Cas12a proteins provided herein includes 1, 2, 3, 4, 5, 6, 7, 8, 9, 10, 11, 12, 13, 14, 15, 16, 17, 18, 19, or 20 amino acid deletions. Without wishing to be bound by any particular theory, there is a helical region in Cas12a, which includes residues 661-667 of SEQ ID NO: 358, that may obstruct the function of a cytidine deaminase that is fused to the Cas12a. Accordingly, aspects of the disclosure provide Cas12a proteins including mutations (e.g., deletions) that disrupt this helical region in Cas12a. In some embodiments, the Cas12a protein includes one or more deletions of the residues K661, K662, T663, G664, D665, Q666, and K667 in SEQ ID NO: 358, or one or more corresponding deletions in another Cas12a protein.

[0092] In some embodiments, a base-editing system provided herein includes a “split Cas12a” protein. For example, split Cas12a proteins which have N- and C-termini that differ from wild-type Cas12a proteins. Split Cas12a proteins offer different points of fusion for a deaminase. For example, a deaminase could be integrated at the split point of a split Cas12a protein. See, Nihongaki et al., Nat Chem Biol. (2019) (9):882-888. PMID: 31406371. In other embodiments, a base-editing system provided herein includes Cas12a proteins with novel protein topologies. In some embodiments, the Cas12a protein domain is reorganized but no truncated, such as in ‘circular permutation’ of proteins. For example, in some embodiments, Cas12a protein is circularized via simultaneous fusion of a deaminase to both N- and C-termini, to create new N- and C-termini at another position in the sequence, in effect, moving a C-terminal portion of the protein to the N-terminus. See, Yu et al., Trends Biotechnol. (2011) 29(1): 18-25. PMID: 21087800. Exemplary amino acid sequences of suitable Cas12a domains and portions thereof are provided herein, and additional suitable sequences of Cas12a domains and portions thereof will be apparent to those of skill in the art.

[0093] Some aspects of the disclosure provide base-editing systems (e.g., any of the base-editing systems provided herein) including a Cas12a domain that has high fidelity. Additional aspects of the disclosure provide Cas12a base-editing systems (e.g., any of the base-editing systems provided herein) including a Cas12a domain with decreased electrostatic interactions between the Cas12a domain and a sugar-phosphate backbone of a DNA, as compared to a wild-type Cas12a domain. In some embodiments, a Cas12a domain (e.g., a wild type Cas12a domain) includes one or more mutations that decreases the association between the Cas12a domain and a sugar-phosphate backbone of a DNA. Cas12a domains with high fidelity are known in the art and would be apparent to the skilled artisan.

### Cas12h and Cas12i Domains

[0094] In some embodiments, the DNA binding domain of any of the base-editing systems provided herein is a Cas12h or a Cas12i. Cas12h and Cas12i demonstrate RNA-guided double-stranded (dsDNA) interference activity. Further, Cas12i exhibits markedly different efficiencies of CRISPR RNA spacer complementary and noncomplementary strand cleavage resulting in predominant dsDNA nicking (see, e.g., Yan et al., Science (2019) 363(6422):88-91. PMID: 30523077). In some embodiments, Cas refers to a Cas12h or a Cas12i. Suitable Cas12h domains and Cas12i domains will be apparent to those of skill in the art based on this disclosure and knowledge in the field, and are within the scope of this disclosure (see, e.g., Yan et al., Science (2019) 363, Issue 6422, pp. 88-91. PMID: 30523077).

[0095] In some embodiments, the present disclosure relates to nuclease inactive Cas12h domains (dCas12h) or Cas12h nickase domains. In some embodiments, the present disclosure relates to nuclease inactive Cas12i domains (dCas12i) or Cas12i nickase domains.

[0096] In some embodiments, proteins including portions of Cas12h are provided. In some embodiments, proteins including Cas12h or portions thereof are referred to as “Cas12h variants.” A Cas12h variant shares homology to Cas12h, or a portion thereof. For example, a Cas12h variant is at least 70% identical, at least 72.5% identical, at least 75% identical, at least 77.5% identical, at least 80% identical, at least 82.5% identical, at least 85% identical, at least 87.5% identical, at least 90% identical, at least 91% identical, at least 92% identical, at least 93% identical, at least 94% identical, at least 95% identical, at least 96% identical, at least 97% identical, at least 98% identical, at least 99% identical, at least 99.5% identical, or at least 99.9% identical to wild type Cas12h. In some embodiments, the Cas12h variant may have 1 or more, 2 or more, 3 or more, 4 or more, 5 or more, 6 or more, 7 or more, 8 or more, 9 or more, 10 or more, 11 or more, 12 or more, 13 or more, 14 or more, 15 or more, 16 or more, 17 or more, 18 or more, 19 or more, 20 or more, 21 or more, 22 or more, 23 or more, 24 or more, 25 or more, 26 or more, 27 or more, 28 or more, 29 or more, 30 or more, 31 or more, 32 or more, 33 or more, 34 or more, 35 or more, 36 or more, 37 or more, 38 or more, 39 or more, 40 or more, 41 or more, 42 or more, 43 or more, 44 or more, 45 or more, 46 or more, 47 or more, 48 or more, 49 or more, or 50 or more amino acid changes compared to wild type Cas12h. In some embodiments, the Cas12h variant includes a portion of Cas12h (e.g., a gRNA binding domain or a DNA-cleavage domain), such that the Cas12h portion is at least 70% identical, at least 72.5% identical, at least 75% identical, at least 77.5% identical, at least 80% identical, at least 82.5% identical, at least 85% identical, at least 87.5% identical, at least 90% identical, at least 91% identical, at least 92% identical, at least 93% identical, at least 94% identical, at least 95% identical, at least 96% identical, at least 97% identical, at least 98% identical, at least 99% identical, at least 99.5% identical, or at least 99.9% identical to the corresponding portion of wild type Cas12h. In some embodiments, the Cas12h portion is at least 50%, at least 55%, at least 60%, at least 65%, at least 70%, at least 72.5%, at least 75%, at least 77.5%, at least 80%, at least 82.5%, at least 85%, at least 87.5%, at least 90%, at least 91%, at least 92%, at least 93%, at least 94%, at least 95%, at least 96%, at least 97%, at least 98%, at least 99%, at least 99.5%, or at least 99.9% of the amino acid length of a corresponding wild type Cas12h. In some embodiments, the Cas12h portion is at least 100 amino acids in length. In some embodiments, the Cas12h portion is at least 100, at least 150, at least 200, at least 250, at least 300, at least 350, at least 400, at least 450, at least 500, at least 550, at least 600, at least 650, at least 700, at least 750, at least 800, at least 850, at least 900, at least 950, at least 1000, at least 1050, at least 1100, at least 1150, at least 1200, at least 1250, or at least 1300 amino acids in length.

[0097] In some embodiments, proteins including portions of Cas12i are provided. In some embodiments, proteins including Cas12i or portions thereof are referred to as “Cas12i variants.” A Cas12i variant shares homology to Cas12i, or a portion thereof. For example, a Cas12i variant is at least 70% identical, at least 72.5% identical, at least 75% identical, at least 77.5% identical, at least 80% identical, at least 82.5% identical, at least 85% identical, at least 87.5% identical, at least 90% identical, at least 91% identical, at least 92% identical, at least 93% identical, at least 94% identical, at least 95% identical, at least 96% identical, at least 97% identical, at least 98% identical, at least 99% identical, at least 99.5% identical, or at least 99.9% identical to wild type Cas12i. In some embodiments, the Cas12i variant may have 1 or more, 2 or more, 3 or more, 4 or more, 5 or more, 6 or more, 7 or more, 8 or more, 9 or more, 10 or more, 11 or more, 12 or more, 13 or more, 14 or more, 15 or more, 16 or more, 17 or more, 18 or more, 19 or more, 20 or more, 21 or more, 22 or more, 23 or more, 24 or more, 25 or more, 26 or more, 27 or more, 28 or more, 29 or more, 30 or more, 31 or more, 32 or more, 33 or more, 34 or more, 35 or more, 36 or more, 37 or more, 38 or more, 39 or more, 40 or more, 41 or more, 42 or more, 43 or more, 44 or more, 45 or more, 46 or more, 47 or more, 48 or more, 49 or more, or 50 or more amino acid changes compared to wild type Cas12i. In some embodiments, the Cas12i variant includes a portion of Cas12i (e.g., a gRNA binding domain or a DNA-cleavage domain), such that the Cas12i portion is at least 70% identical, at least 72.5% identical, at least 75% identical, at least 77.5% identical, at least 80% identical, at least 82.5% identical, at least 85% identical, at least 87.5% identical, at least 90% identical, at least 91% identical, at least 92% identical, at least 93% identical, at least 94% identical, at least 95% identical, at least 96% identical, at least 97% identical, at least 98% identical, at least 99% identical, at least 99.5% identical, or at least 99.9% identical to the corresponding portion of wild type Cas12i. In some embodiments, the Cas12i portion is at least 50%, at least 55%, at least 60%, at least 65%, at least 70%, at least 72.5%, at least 75%, at least 77.5%, at least 80%, at least 82.5%, at least 85%, at least 87.5%, at least 90%, at least 91%, at least 92%, at least 93%, at least 94%, at least 95%, at least 96%, at least 97%, at least 98%, at least 99%, at least 99.5%, or at least 99.9% of the amino acid length of a corresponding wild type Cas12i. In some embodiments, the Cas12i portion is at least 100 amino acids in length. In some embodiments, the Cas12i portion is at least 100, at least 150, at least 200, at least 250, at least 300, at least 350, at least 400, at least 450, at least 500, at least 550, at least 600, at least 650, at least 700, at least 750, at least 800, at least 850, at least 900, at least 950, at least 1000, at least 1050, at least 1100, at least 1150, at least 1200, at least 1250, or at least 1300 amino acids in length.

### CasX and CasY Domains

[0098] In some embodiments, the DNA binding domain of any of the base-editing systems provided herein is a Cas domain from archaea (e.g., nanoarchaea), which constitute a domain and kingdom of single-celled prokaryotic microbes. In some embodiments, the DNA binding domain is CasX or CasY, which have been described in, for example, Burstein et al., Cell Res (2017) 542(7640):237-241. PMID: 28005056. Using genome-resolved metagenomics, a number of CRISPR-Cas systems were identified, including the first reported Cas domain in the archaeal domain of life. This divergent Cas protein was found in nanoarchaea as part of an active CRISPR-Cas system. In bacteria, two previously unknown systems were discovered, CRISPR-CasX and CRISPR-CasY, which are among the most compact systems yet discovered.

[0099] In some embodiments, Cas refers to CasX, or a variant of CasX. In some embodiments, Cas refers to a CasY, or a variant of CasY. Additional suitable CasX domains and CasY domains will be apparent to those of skill in the art based on this disclosure and knowledge in the field, and are within the scope of this disclosure.

[0100] In some embodiments, the DNA binding domain of any of the base-editing systems provided herein is a CasX domain. In some embodiments, the CasX domain includes an amino acid sequence that is that is at least about 60% identical, at least about 65% identical, at least about 70% identical, at least about 72.5% identical, at least about 75% identical, at least about 77.5% identical, at least about 80% identical, at least about 82.5% identical, at least about 85% identical, at least about 87.5% identical, at least about 90% identical, at least about 91% identical, at least about 92% identical, at least about 93% identical, at least about 94% identical, at least about 95% identical, at least about 96% identical, at least about 97% identical, at least about 98% identical, at least about 99% identical, at least about 99.5% identical, or at least about 99.9% identical to SEQ ID NO: 370 or SEQ ID NO: 371. In some embodiments, the CasX domain is SEQ ID NO: 370 or SEQ ID NO: 371. In some embodiments, the CasX domain includes an amino acid sequence that has 1 or more, 2 or more, 3 or more, 4 or more, 5 or more, 6 or more, 7 or more, 8 or more, 9 or more, 10 or more, 11 or more, 12 or more, 13 or more, 14 or more, 15 or more, 16 or more, 17 or more, 18 or more, 19 or more, 20 or more, 21 or more, 22 or more, 23 or more, 24 or more, 25 or more, 26 or more, 27 or more, 28 or more, 29 or more, 30 or more, 31 or more, 32 or more, 33 or more, 34 or more, 35 or more, 36 or more, 37 or more, 38 or more, 39 or more, 40 or more, 41 or more, 42 or more, 43 or more, 44 or more, 45 or more, 46 or more, 47 or more, 48 or more, 49 or more, or 50 or more mutations compared to any one of the amino acid sequences set forth in SEQ ID NO: 370 or SEQ ID NO: 371. In some embodiments, the CasX domain includes an amino acid sequence that has at least 10, at least 15, at least 20, at least 30, at least 40, at least 50, at least 60, at least 70, at least 80, at least 90, at least 100, at least 150, at least 200, at least 250, at least 300, at least 350, at least 400, at least 500, at least 600, at least 700, at least 800, at least 900, at least 1000, at least 1100, or at least 1200 identical contiguous amino acid residues as compared to any one of the amino acid sequences set forth in SEQ ID NO: 370 or SEQ ID NO: 371. In some embodiments, the present disclosure relates to nuclease inactive CasX domains (dCasX) or CasX nickase domains.

[0101] In some embodiments, proteins including portions of CasX are provided. In some embodiments, proteins including CasX or portions thereof are referred to as “CasX variants.” A CasX variant shares homology to CasX, or a portion thereof. For example, a CasX variant is at least 70% identical, at least 72.5% identical, at least 75% identical, at least 77.5% identical, at least 80% identical, at least 82.5% identical, at least 85% identical, at least 87.5% identical, at least 90% identical, at least 91% identical, at least 92% identical, at least 93% identical, at least 94% identical, at least 95% identical, at least 96% identical, at least 97% identical, at least 98% identical, at least 99% identical, at least 99.5% identical, or at least 99.9% identical to wild type CasX. In some embodiments, the CasX variant may have 1 or more, 2 or more, 3 or more, 4 or more, 5 or more, 6 or more, 7 or more, 8 or more, 9 or more, 10 or more, 11 or more, 12 or more, 13 or more, 14 or more, 15 or more, 16 or more, 17 or more, 18 or more, 19 or more, 20 or more, 21 or more, 22 or more, 23 or more, 24 or more, 25 or more, 26 or more, 27 or more, 28 or more, 29 or more, 30 or more, 31 or more, 32 or more, 33 or more, 34 or more, 35 or more, 36 or more, 37 or more, 38 or more, 39 or more, 40 or more, 41 or more, 42 or more, 43 or more, 44 or more, 45 or more, 46 or more, 47 or more, 48 or more, 49 or more, or 50 or more amino acid changes compared to wild type CasX. In some embodiments, the CasX variant includes a portion of CasX (e.g., a gRNA binding domain or a DNA-cleavage domain), such that the CasX portion is at least 70% identical, at least 72.5% identical, at least 75% identical, at least 77.5% identical, at least 80% identical, at least 82.5% identical, at least 85% identical, at least 87.5% identical, at least 90% identical, at least 91% identical, at least 92% identical, at least 93% identical, at least 94% identical, at least 95% identical, at least 96% identical, at least 97% identical, at least 98% identical, at least 99% identical, at least 99.5% identical, or at least 99.9% identical to the corresponding portion of wild type CasX. In some embodiments, the CasX portion is at least 50%, at least 55%, at least 60%, at least 65%, at least 70%, at least 72.5%, at least 75%, at least 77.5%, at least 80%, at least 82.5%, at least 85%, at least 87.5%, at least 90%, at least 91%, at least 92%, at least 93%, at least 94%, at least 95%, at least 96%, at least 97%, at least 98%, at least 99%, at least 99.5%, or at least 99.9% of the amino acid length of a corresponding wild type CasX. In some embodiments, the CasX portion is at least 100 amino acids in length. In some embodiments, the CasX portion is at least 100, at least 150, at least 200, at least 250, at least 300, at least 350, at least 400, at least 450, at least 500, at least 550, at least 600, at least 650, at least 700, at least 750, at least 800, at least 850, at least 900, at least 950, at least 1000, at least 1050, at least 1100, at least 1150, at least 1200, at least 1250, or at least 1300 amino acids in length. Additional suitable CasX domains (e.g., from other bacterial species) will be apparent to those of skill in the art based on this disclosure and knowledge in the field, and are within the scope of this disclosure.

[0102] In some embodiments, the DNA binding domain of any of the base-editing systems provided herein is a CasY domain. In some embodiments, the CasY domain includes an amino acid sequence that is that is at least about 60% identical, at least about 65% identical, at least about 70% identical, at least about 72.5% identical, at least about 75% identical, at least about 77.5% identical, at least about 80% identical, at least about 82.5% identical, at least about 85% identical, at least about 87.5% identical, at least about 90% identical, at least about 91% identical, at least about 92% identical, at least about 93% identical, at least about 94% identical, at least about 95% identical, at least about 96% identical, at least about 97% identical, at least about 98% identical, at least about 99% identical, at least about 99.5% identical, or at least about 99.9% identical to SEQ ID NO: 372. In some embodiments, the CasY domain is SEQ ID NO: 372. In some embodiments, the CasY domain includes an amino acid sequence that has 1 or more, 2 or more, 3 or more, 4 or more, 5 or more, 6 or more, 7 or more, 8 or more, 9 or more, 10 or more, 11 or more, 12 or more, 13 or more, 14 or more, 15 or more, 16 or more, 17 or more, 18 or more, 19 or more, 20 or more, 21 or more, 22 or more, 23 or more, 24 or more, 25 or more, 26 or more, 27 or more, 28 or more, 29 or more, 30 or more, 31 or more, 32 or more, 33 or more, 34 or more, 35 or more, 36 or more, 37 or more, 38 or more, 39 or more, 40 or more, 41 or more, 42 or more, 43 or more, 44 or more, 45 or more, 46 or more, 47 or more, 48 or more, 49 or more, or 50 or more mutations compared to any one of the amino acid sequences set forth in SEQ ID NO: 372. In some embodiments, the CasY domain includes an amino acid sequence that has at least 10, at least 15, at least 20, at least 30, at least 40, at least 50, at least 60, at least 70, at least 80, at least 90, at least 100, at least 150, at least 200, at least 250, at least 300, at least 350, at least 400, at least 500, at least 600, at least 700, at least 800, at least 900, at least 1000, at least 1100, or at least 1200 identical contiguous amino acid residues as compared to any one of the amino acid sequences set forth in SEQ ID NO: 372. Additional suitable CasY domains will be apparent to those of skill in the art based on this disclosure and knowledge in the field, and are within the scope of this disclosure. In some embodiments, the present disclosure relates to nuclease inactive CasY domains (dCasY) or CasY nickase domains.

[0103] In some embodiments, proteins including portions of CasY are provided. In some embodiments, proteins including CasY or portions thereof are referred to as “CasY variants.” A CasY variant shares homology to CasY, or a portion thereof. For example, a CasY variant is at least 70% identical, at least 72.5% identical, at least 75% identical, at least 77.5% identical, at least 80% identical, at least 82.5% identical, at least 85% identical, at least 87.5% identical, at least 90% identical, at least 91% identical, at least 92% identical, at least 93% identical, at least 94% identical, at least 95% identical, at least 96% identical, at least 97% identical, at least 98% identical, at least 99% identical, at least 99.5% identical, or at least 99.9% identical to wild type CasY. In some embodiments, the CasY variant may have 1 or more, 2 or more, 3 or more, 4 or more, 5 or more, 6 or more, 7 or more, 8 or more, 9 or more, 10 or more, 11 or more, 12 or more, 13 or more, 14 or more, 15 or more, 16 or more, 17 or more, 18 or more, 19 or more, 20 or more, 21 or more, 22 or more, 23 or more, 24 or more, 25 or more, 26 or more, 27 or more, 28 or more, 29 or more, 30 or more, 31 or more, 32 or more, 33 or more, 34 or more, 35 or more, 36 or more, 37 or more, 38 or more, 39 or more, 40 or more, 41 or more, 42 or more, 43 or more, 44 or more, 45 or more, 46 or more, 47 or more, 48 or more, 49 or more, or 50 or more amino acid changes compared to wild type CasY. In some embodiments, the CasY variant includes a portion of CasY (e.g., a gRNA binding domain or a DNA-cleavage domain), such that the CasY portion is at least 70% identical, at least 72.5% identical, at least 75% identical, at least 77.5% identical, at least 80% identical, at least 82.5% identical, at least 85% identical, at least 87.5% identical, at least 90% identical, at least 91% identical, at least 92% identical, at least 93% identical, at least 94% identical, at least 95% identical, at least 96% identical, at least 97% identical, at least 98% identical, at least 99% identical, at least 99.5% identical, or at least 99.9% identical to the corresponding portion of wild type CasY. In some embodiments, the CasY portion is at least 50%, at least 55%, at least 60%, at least 65%, at least 70%, at least 72.5%, at least 75%, at least 77.5%, at least 80%, at least 82.5%, at least 85%, at least 87.5%, at least 90%, at least 91%, at least 92%, at least 93%, at least 94%, at least 95%, at least 96%, at least 97%, at least 98%, at least 99%, at least 99.5%, or at least 99.9% of the amino acid length of a corresponding wild type CasY. In some embodiments, the CasY portion is at least 100 amino acids in length. In some embodiments, the CasY portion is at least 100, at least 150, at least 200, at least 250, at least 300, at least 350, at least 400, at least 450, at least 500, at least 550, at least 600, at least 650, at least 700, at least 750, at least 800, at least 850, at least 900, at least 950, at least 1000, at least 1050, at least 1100, at least 1150, at least 1200, at least 1250, or at least 1300 amino acids in length. Additional suitable CasY domains (e.g., from other bacterial species) will be apparent to those of skill in the art based on this disclosure and knowledge in the field, and are within the scope of this disclosure.

### C2c1, C2c2, and C2c3 Domains

[0104] In addition to Cas9 and Cas12a, three distinct Class 2 CRISPR-Cas systems (C2c1, C2c2, and C2c3) have been described by Shmakov et al., Mol. Cell (2015) 60(3): 385-397. PMID: 26593719. Effectors of two of the systems, C2c1 and C2c3, contain RuvC-like endonuclease domains related to Cas12a. A third system, C2c2 contains an effector with two predicted HEPN RNase domains. Production of mature CRISPR RNA is tracrRNA-independent, unlike production of CRISPR RNA by C2c1. C2c1 depends on both CRISPR RNA and tracrRNA for DNA cleavage. Bacterial C2c2 has been shown to possess a unique RNase activity for CRISPR RNA maturation distinct from its RNA-activated single-stranded RNA degradation activity. These RNase functions are different from each other and from the CRISPR RNA-processing behavior of Cas12a (see, e.g., East-Seletsky, et al., Nature (2016) 538(7624):270-273. PMID: 27669025). In vitro biochemical analysis of C2c2 in Leptotrichia shahii has shown that C2c2 is guided by a single CRISPR RNA and can be programmed to cleave ssRNA targets carrying complementary protospacers. Catalytic residues in the two conserved HEPN domains mediate cleavage. Mutations in the catalytic residues generate catalytically inactive RNA-binding proteins (see, e.g., Abudayyeh et al., Science (2016) 353(6299). PMID: 27256883).

[0105] The crystal structure of Alicyclobaccillus acidoterrastris C2c1 (AacC2c1) has been reported in complex with a chimeric single-molecule guide RNA (sgRNA) (see, e.g., Liu et al., Mol. Cell (2017) 65(2):310-322. PMID: 27989439). The crystal structure has also been reported for A. acidoterrestris C2c1 bound to target DNAs as ternary complexes (see, e.g., Yang et al., Cell (2016) 167(7): 1814-1828. PMID: 27984729). Catalytically competent conformations of AacC2c1, both with target and non-target DNA strands, have been captured independently positioned within a single RuvC catalytic pocket, with C2c1-mediated cleavage resulting in a staggered seven-nucleotide break of target DNA. Structural comparisons between C2c1 ternary complexes and previously identified Cas9 and Cas12a counterparts demonstrate the diversity of mechanisms used by CRISPR-Cas9 systems. Additional suitable C2c1 domains, C2c2 domains, and C2c3 domains will be apparent to those of skill in the art based on this disclosure and knowledge in the field, and are within the scope of this disclosure.

[0106] In some embodiments, the DNA binding domain of any of the base-editing systems provided herein is a C2c1 domain. In some embodiments, the C2c1 domain includes an amino acid sequence that is that is at least about 60% identical, at least about 65% identical, at least about 70% identical, at least about 72.5% identical, at least about 75% identical, at least about 77.5% identical, at least about 80% identical, at least about 82.5% identical, at least about 85% identical, at least about 87.5% identical, at least about 90% identical, at least about 91% identical, at least about 92% identical, at least about 93% identical, at least about 94% identical, at least about 95% identical, at least about 96% identical, at least about 97% identical, at least about 98% identical, at least about 99% identical, at least about 99.5% identical, or at least about 99.9% identical to SEQ ID NO: 367. In some embodiments, the C2c1 domain is SEQ ID NO: 367. In some embodiments, the C2c1 domain includes an amino acid sequence that has 1 or more, 2 or more, 3 or more, 4 or more, 5 or more, 6 or more, 7 or more, 8 or more, 9 or more, 10 or more, 11 or more, 12 or more, 13 or more, 14 or more, 15 or more, 16 or more, 17 or more, 18 or more, 19 or more, 20 or more, 21 or more, 22 or more, 23 or more, 24 or more, 25 or more, 26 or more, 27 or more, 28 or more, 29 or more, 30 or more, 31 or more, 32 or more, 33 or more, 34 or more, 35 or more, 36 or more, 37 or more, 38 or more, 39 or more, 40 or more, 41 or more, 42 or more, 43 or more, 44 or more, 45 or more, 46 or more, 47 or more, 48 or more, 49 or more, or 50 or more mutations compared to any one of the amino acid sequences set forth in SEQ ID NO: 367. In some embodiments, the C2c1 domain includes an amino acid sequence that has at least 10, at least 15, at least 20, at least 30, at least 40, at least 50, at least 60, at least 70, at least 80, at least 90, at least 100, at least 150, at least 200, at least 250, at least 300, at least 350, at least 400, at least 500, at least 600, at least 700, at least 800, at least 900, at least 1000, at least 1100, or at least 1200 identical contiguous amino acid residues as compared to any one of the amino acid sequences set forth in SEQ ID NO: 367. In some embodiments, the present disclosure relates to nuclease inactive C2c1 domains (dC2c1) or C2c1 nickase domains.

[0107] In some embodiments, proteins including portions of C2c1 are provided. In some embodiments, proteins including C2c1 or portions thereof are referred to as “C2c1 variants.” A C2c1 variant shares homology to C2c1, or a portion thereof. For example, a C2c1 variant is at least 70% identical, at least 72.5% identical, at least 75% identical, at least 77.5% identical, at least 80% identical, at least 82.5% identical, at least 85% identical, at least 87.5% identical, at least 90% identical, at least 91% identical, at least 92% identical, at least 93% identical, at least 94% identical, at least 95% identical, at least 96% identical, at least 97% identical, at least 98% identical, at least 99% identical, at least 99.5% identical, or at least 99.9% identical to wild type C2c1. In some embodiments, the C2c1 variant may have 1 or more, 2 or more, 3 or more, 4 or more, 5 or more, 6 or more, 7 or more, 8 or more, 9 or more, 10 or more, 11 or more, 12 or more, 13 or more, 14 or more, 15 or more, 16 or more, 17 or more, 18 or more, 19 or more, 20 or more, 21 or more, 22 or more, 23 or more, 24 or more, 25 or more, 26 or more, 27 or more, 28 or more, 29 or more, 30 or more, 31 or more, 32 or more, 33 or more, 34 or more, 35 or more, 36 or more, 37 or more, 38 or more, 39 or more, 40 or more, 41 or more, 42 or more, 43 or more, 44 or more, 45 or more, 46 or more, 47 or more, 48 or more, 49 or more, or 50 or more amino acid changes compared to wild type C2c1. In some embodiments, the C2c1 variant includes a portion of C2c1 (e.g., a gRNA binding domain or a DNA-cleavage domain), such that the C2c1 portion is at least 70% identical, at least 72.5% identical, at least 75% identical, at least 77.5% identical, at least 80% identical, at least 82.5% identical, at least 85% identical, at least 87.5% identical, at least 90% identical, at least 91% identical, at least 92% identical, at least 93% identical, at least 94% identical, at least 95% identical, at least 96% identical, at least 97% identical, at least 98% identical, at least 99% identical, at least 99.5% identical, or at least 99.9% identical to the corresponding portion of wild type C2c1. In some embodiments, the C2c1 portion is at least 50%, at least 55%, at least 60%, at least 65%, at least 70%, at least 72.5%, at least 75%, at least 77.5%, at least 80%, at least 82.5%, at least 85%, at least 87.5%, at least 90%, at least 91%, at least 92%, at least 93%, at least 94%, at least 95%, at least 96%, at least 97%, at least 98%, at least 99%, at least 99.5%, or at least 99.9% of the amino acid length of a corresponding wild type C2c1. In some embodiments, the C2c1 portion is at least 100 amino acids in length. In some embodiments, the C2c1 portion is at least 100, at least 150, at least 200, at least 250, at least 300, at least 350, at least 400, at least 450, at least 500, at least 550, at least 600, at least 650, at least 700, at least 750, at least 800, at least 850, at least 900, at least 950, at least 1000, at least 1050, at least 1100, at least 1150, at least 1200, at least 1250, or at least 1300 amino acids in length. Additional suitable C2c1 domains (e.g., from other bacterial species) will be apparent to those of skill in the art based on this disclosure and knowledge in the field, and are within the scope of this disclosure.

[0108] In some embodiments, the DNA binding domain of any of the base-editing systems provided herein is a C2c2 domain. In some embodiments, the C2c2 domain includes an amino acid sequence that is that is at least about 60% identical, at least about 65% identical, at least about 70% identical, at least about 72.5% identical, at least about 75% identical, at least about 77.5% identical, at least about 80% identical, at least about 82.5% identical, at least about 85% identical, at least about 87.5% identical, at least about 90% identical, at least about 91% identical, at least about 92% identical, at least about 93% identical, at least about 94% identical, at least about 95% identical, at least about 96% identical, at least about 97% identical, at least about 98% identical, at least about 99% identical, at least about 99.5% identical, or at least about 99.9% identical to SEQ ID NO: 368. In some embodiments, the C2c2 domain is SEQ ID NO: 368. In some embodiments, the C2c2 domain includes an amino acid sequence that has 1 or more, 2 or more, 3 or more, 4 or more, 5 or more, 6 or more, 7 or more, 8 or more, 9 or more, 10 or more, 11 or more, 12 or more, 13 or more, 14 or more, 15 or more, 16 or more, 17 or more, 18 or more, 19 or more, 20 or more, 21 or more, 22 or more, 23 or more, 24 or more, 25 or more, 26 or more, 27 or more, 28 or more, 29 or more, 30 or more, 31 or more, 32 or more, 33 or more, 34 or more, 35 or more, 36 or more, 37 or more, 38 or more, 39 or more, 40 or more, 41 or more, 42 or more, 43 or more, 44 or more, 45 or more, 46 or more, 47 or more, 48 or more, 49 or more, or 50 or more mutations compared to any one of the amino acid sequences set forth in SEQ ID NO: 368. In some embodiments, the C2c2 domain includes an amino acid sequence that has at least 10, at least 15, at least 20, at least 30, at least 40, at least 50, at least 60, at least 70, at least 80, at least 90, at least 100, at least 150, at least 200, at least 250, at least 300, at least 350, at least 400, at least 500, at least 600, at least 700, at least 800, at least 900, at least 1000, at least 1100, or at least 1200 identical contiguous amino acid residues as compared to any one of the amino acid sequences set forth in SEQ ID NO: 368. In some embodiments, the present disclosure relates to nuclease inactive C2c2 domains (dC2c2) or C2c2 nickase domains.

[0109] In some embodiments, proteins including portions of C2c2 are provided. In some embodiments, proteins including C2c2 or portions thereof are referred to as “C2c2 variants.” A C2c2 variant shares homology to C2c2, or a portion thereof. For example, a C2c2 variant is at least 70% identical, at least 72.5% identical, at least 75% identical, at least 77.5% identical, at least 80% identical, at least 82.5% identical, at least 85% identical, at least 87.5% identical, at least 90% identical, at least 91% identical, at least 92% identical, at least 93% identical, at least 94% identical, at least 95% identical, at least 96% identical, at least 97% identical, at least 98% identical, at least 99% identical, at least 99.5% identical, or at least 99.9% identical to wild type C2c2. In some embodiments, the C2c2 variant may have 1 or more, 2 or more, 3 or more, 4 or more, 5 or more, 6 or more, 7 or more, 8 or more, 9 or more, 10 or more, 11 or more, 12 or more, 13 or more, 14 or more, 15 or more, 16 or more, 17 or more, 18 or more, 19 or more, 20 or more, 21 or more, 22 or more, 23 or more, 24 or more, 25 or more, 26 or more, 27 or more, 28 or more, 29 or more, 30 or more, 31 or more, 32 or more, 33 or more, 34 or more, 35 or more, 36 or more, 37 or more, 38 or more, 39 or more, 40 or more, 41 or more, 42 or more, 43 or more, 44 or more, 45 or more, 46 or more, 47 or more, 48 or more, 49 or more, or 50 or more amino acid changes compared to wild type C2c2. In some embodiments, the C2c2 variant includes a portion of C2c2 (e.g., a gRNA binding domain or a DNA-cleavage domain), such that the C2c2 portion is at least 70% identical, at least 72.5% identical, at least 75% identical, at least 77.5% identical, at least 80% identical, at least 82.5% identical, at least 85% identical, at least 87.5% identical, at least 90% identical, at least 91% identical, at least 92% identical, at least 93% identical, at least 94% identical, at least 95% identical, at least 96% identical, at least 97% identical, at least 98% identical, at least 99% identical, at least 99.5% identical, or at least 99.9% identical to the corresponding portion of wild type C2c2. In some embodiments, the C2c2 portion is at least 50%, at least 55%, at least 60%, at least 65%, at least 70%, at least 72.5%, at least 75%, at least 77.5%, at least 80%, at least 82.5%, at least 85%, at least 87.5%, at least 90%, at least 91%, at least 92%, at least 93%, at least 94%, at least 95%, at least 96%, at least 97%, at least 98%, at least 99%, at least 99.5%, or at least 99.9% of the amino acid length of a corresponding wild type C2c2. In some embodiments, the C2c2 portion is at least 100 amino acids in length. In some embodiments, the C2c2 portion is at least 100, at least 150, at least 200, at least 250, at least 300, at least 350, at least 400, at least 450, at least 500, at least 550, at least 600, at least 650, at least 700, at least 750, at least 800, at least 850, at least 900, at least 950, at least 1000, at least 1050, at least 1100, at least 1150, at least 1200, at least 1250, or at least 1300 amino acids in length. Additional suitable C2c2 domains (e.g., from other bacterial species) will be apparent to those of skill in the art based on this disclosure and knowledge in the field, and are within the scope of this disclosure.

[0110] In some embodiments, the DNA binding domain of any of the base-editing systems provided herein is a C2c3 domain. In some embodiments, the C2c3 domain includes an amino acid sequence that is that is at least about 60% identical, at least about 65% identical, at least about 70% identical, at least about 72.5% identical, at least about 75% identical, at least about 77.5% identical, at least about 80% identical, at least about 82.5% identical, at least about 85% identical, at least about 87.5% identical, at least about 90% identical, at least about 91% identical, at least about 92% identical, at least about 93% identical, at least about 94% identical, at least about 95% identical, at least about 96% identical, at least about 97% identical, at least about 98% identical, at least about 99% identical, at least about 99.5% identical, or at least about 99.9% identical to SEQ ID NO: 369. In some embodiments, the C2c3 domain is SEQ ID NO: 369. In some embodiments, the C2c3 domain includes an amino acid sequence that has 1 or more, 2 or more, 3 or more, 4 or more, 5 or more, 6 or more, 7 or more, 8 or more, 9 or more, 10 or more, 11 or more, 12 or more, 13 or more, 14 or more, 15 or more, 16 or more, 17 or more, 18 or more, 19 or more, 20 or more, 21 or more, 22 or more, 23 or more, 24 or more, 25 or more, 26 or more, 27 or more, 28 or more, 29 or more, 30 or more, 31 or more, 32 or more, 33 or more, 34 or more, 35 or more, 36 or more, 37 or more, 38 or more, 39 or more, 40 or more, 41 or more, 42 or more, 43 or more, 44 or more, 45 or more, 46 or more, 47 or more, 48 or more, 49 or more, or 50 or more mutations compared to any one of the amino acid sequences set forth in SEQ ID NO: 369. In some embodiments, the C2c3 domain includes an amino acid sequence that has at least 10, at least 15, at least 20, at least 30, at least 40, at least 50, at least 60, at least 70, at least 80, at least 90, at least 100, at least 150, at least 200, at least 250, at least 300, at least 350, at least 400, at least 500, at least 600, at least 700, at least 800, at least 900, at least 1000, at least 1100, or at least 1200 identical contiguous amino acid residues as compared to any one of the amino acid sequences set forth in SEQ ID NO: 369. In some embodiments, the present disclosure relates to nuclease inactive C2c3 domains (dC2c3) or C2c3 nickase domains. [M111] In some embodiments, proteins including portions of C2c3 are provided. In some embodiments, proteins including C2c3 or portions thereof are referred to as “C2c3 variants.” A C2c3 variant shares homology to C2c3, or a portion thereof. For example, a C2c3 variant is at least 70% identical, at least 72.5% identical, at least 75% identical, at least 77.5% identical, at least 80% identical, at least 82.5% identical, at least 85% identical, at least 87.5% identical, at least 90% identical, at least 91% identical, at least 92% identical, at least 93% identical, at least 94% identical, at least 95% identical, at least 96% identical, at least 97% identical, at least 98% identical, at least 99% identical, at least 99.5% identical, or at least 99.9% identical to wild type C2c3. In some embodiments, the C2c3 variant may have 1 or more, 2 or more, 3 or more, 4 or more, 5 or more, 6 or more, 7 or more, 8 or more, 9 or more, 10 or more, 11 or more, 12 or more, 13 or more, 14 or more, 15 or more, 16 or more, 17 or more, 18 or more, 19 or more, 20 or more, 21 or more, 22 or more, 23 or more, 24 or more, 25 or more, 26 or more, 27 or more, 28 or more, 29 or more, 30 or more, 31 or more, 32 or more, 33 or more, 34 or more, 35 or more, 36 or more, 37 or more, 38 or more, 39 or more, 40 or more, 41 or more, 42 or more, 43 or more, 44 or more, 45 or more, 46 or more, 47 or more, 48 or more, 49 or more, or 50 or more amino acid changes compared to wild type C2c3. In some embodiments, the C2c3 variant includes a portion of C2c3 (e.g., a gRNA binding domain or a DNA-cleavage domain), such that the C2c3 portion is at least 70% identical, at least 72.5% identical, at least 75% identical, at least 77.5% identical, at least 80% identical, at least 82.5% identical, at least 85% identical, at least 87.5% identical, at least 90% identical, at least 91% identical, at least 92% identical, at least 93% identical, at least 94% identical, at least 95% identical, at least 96% identical, at least 97% identical, at least 98% identical, at least 99% identical, at least 99.5% identical, or at least 99.9% identical to the corresponding portion of wild type C2c3. In some embodiments, the C2c3 portion is at least 50%, at least 55%, at least 60%, at least 65%, at least 70%, at least 72.5%, at least 75%, at least 77.5%, at least 80%, at least 82.5%, at least 85%, at least 87.5%, at least 90%, at least 91%, at least 92%, at least 93%, at least 94%, at least 95%, at least 96%, at least 97%, at least 98%, at least 99%, at least 99.5%, or at least 99.9% of the amino acid length of a corresponding wild type C2c3. In some embodiments, the C2c3 portion is at least 100 amino acids in length. In some embodiments, the C2c3 portion is at least 100, at least 150, at least 200, at least 250, at least 300, at least 350, at least 400, at least 450, at least 500, at least 550, at least 600, at least 650, at least 700, at least 750, at least 800, at least 850, at least 900, at least 950, at least 1000, at least 1050, at least 1100, at least 1150, at least 1200, at least 1250, or at least 1300 amino acids in length. Additional suitable C2c3 domains (e.g., from other bacterial species) will be apparent to those of skill in the art based on this disclosure and knowledge in the field, and are within the scope of this disclosure.

### TALE Domains

[0111] Transcription activator-like effectors (TALEs) can be engineered to bind practically any DNA sequence. TALEs are DNA binding domains derived from various plant bacterial pathogens of the genus Xanthomonas, which secrete TALEs into the host plant cell during infection. The TALEs move to the nucleus, where they recognize and bind to a specific DNA sequence in the promoter region of a specific gene in the host genome. TALEs have a central DNA binding domain composed of 13-28 repeat monomers of 33-34 amino acids. The amino acids of each monomer are highly conserved, except for hypervariable amino acid residues at positions 12 and 13. The two hypervariable amino acids are called repeat-variable diresidues (RVDs). The amino acid pairs NI, NG, HD, and NN of RVDs preferentially recognize adenine, thymine, cytosine, and guanine/adenine, respectively, and modulation of RVDs can recognize consecutive DNA bases. This simple relationship between amino acid sequence and DNA recognition has allowed for the engineering of specific DNA binding domains by selecting a combination of repeat segments containing the appropriate RVDs. The transcription activator-like effector (TALE) DNA binding domain can be fused to a functional domain, such as a recombinase, a nuclease, a transposase or a helicase, thus conferring sequence specificity to the functional domain.

[0112] The TALE disclosed herein, may be full-length or a portion thereof. In some embodiments, proteins including TALE, or portions thereof, are referred to as “TALE variants”. A TALE variant shares homology to TALE, or a portion thereof. For example a TALE variant is at least 70% identical, at least 72.5% identical, at least 75% identical, at least 77.5% identical, at least 80% identical, at least 82.5% identical, at least 85% identical, at least 87.5% identical, at least 90% identical, at least 91% identical, at least 92% identical, at least 93% identical, at least 94% identical, at least 95% identical, at least 96% identical, at least 97% identical, at least 98% identical, at least 99% identical, at least 99.5% identical, or at least 99.9% identical to wild type TALE. In some embodiments, the TALE variant includes a portion of TALE, such that the portion is at least 70% identical, at least 72.5% identical, at least 75% identical, at least 77.5% identical, at least 80% identical, at least 82.5% identical, at least 85% identical, at least 87.5% identical, at least 90% identical, at least 91% identical, at least 92% identical, at least 93% identical, at least 94% identical, at least 95% identical, at least 96% identical, at least 97% identical, at least 98% identical, at least 99% identical, at least 99.5% identical, or at least 99.9% identical to the corresponding portion of wild type TALE.

[0113] The relationship between amino acid sequence and DNA recognition of the TALE binding domain allows for designable proteins. Software programs such as DNA Works can be used to design TALE constructs. Other methods of designing TALE constructs are known to those of skill in the art (see, e.g., Doyle et al., Nucleic Acids Res (2012) 40(W1):W117- W122; and Cermak, Nucleic Acids Res (2011) 39(12):e82).

### Zinc Finger Domains

[0114] Zinc fingers (ZFs) are engineered DNA binding domains. Recognition site specificity is conferred by the zinc finger domain, which typically includes two, three, or four zinc fingers, for example having a C2H2 structure, however other zinc finger structures are known and have been engineered. Zinc finger domains can be used for designing polypeptides which specifically bind a selected polynucleotide recognition sequence. Additional functionalities can be fused to the zinc finger binding domain, including transcriptional activator domains, transcription repressor domains, and methylases. In some examples, dimerization of nuclease domain is required for cleavage activity. Each zinc finger recognizes three consecutive base pairs in the target DNA. For example, a 3 finger domain recognizes a sequence of 9 contiguous nucleotides so that two sets of zinc finger triplets are used to bind a 18 nucleotide recognition sequence. Details of ZFs can be found in Urnov et al., Nat Rev Genet (2010) 11(9):636-46. PMID: 20717154.

[0115] The DNA binding domain of a ZF is typically composed of 3-4 zinc fingers. The amino acids at positions −1, +2, +3, and +6 relative to the start of the zinc finger α-helix, which contribute to site-specific binding to the target DNA, can be changed and customized to fit specific target sequences. The other amino acids form the consensus backbone to generate ZFs with different sequence specificities. Rules for selecting target sequences for ZFs are known in the art.

[0116] The ZF disclosed herein, may be full-length or a portion thereof. In some embodiments, proteins including the ZF, or portions thereof, are referred to as “ZF variants”.

[0117] A ZF variant shares homology to ZF, or a portion thereof. For example a ZF variant is at least 70% identical, at least 72.5% identical, at least 75% identical, at least 77.5% identical, at least 80% identical, at least 82.5% identical, at least 85% identical, at least 87.5% identical, at least 90% identical, at least 91% identical, at least 92% identical, at least 93% identical, at least 94% identical, at least 95% identical, at least 96% identical, at least 97% identical, at least 98% identical, at least 99% identical, at least 99.5% identical, or at least 99.9% identical to wild type ZF. In some embodiments, the ZF variant includes a portion of ZF, such that the portion is at least 70% identical, at least 72.5% identical, at least 75% identical, at least 77.5% identical, at least 80% identical, at least 82.5% identical, at least 85% identical, at least 87.5% identical, at least 90% identical, at least 91% identical, at least 92% identical, at least 93% identical, at least 94% identical, at least 95% identical, at least 96% identical, at least 97% identical, at least 98% identical, at least 99% identical, at least 99.5% identical, or at least 99.9% identical to the corresponding portion of wild type ZF.

[0118] Because the DNA-binding specificities of zinc finger domains can in principle be reengineered using one of various methods, customized ZFs can theoretically be constructed to target nearly any gene sequence. Publicly available methods for engineering zinc finger domains include Context-dependent Assembly (CoDA), Oligomerized Pool Engineering (OPEN), and Modular Assembly.

### Meganucleases

[0119] Meganucleases, which are commonly identified in microbes, are unique enzymes with high activity and long recognition sequences (>14 bp) resulting in site-specific digestion of target DNA. Engineered versions of naturally occurring meganucleases typically have extended DNA recognition sequences (for example, 14-40 bp).

[0120] The engineering of meganucleases is more challenging than that of ZFs and TALE because the DNA recognition and cleavage functions of meganucleases are intertwined in a single domain. Specialized methods of mutagenesis and high-throughput screening have been used to create novel meganuclease variants that recognize unique sequences and possess improved nuclease activity.

### Argonautes

[0121] The Argonaute protein family is a DNA-guided endonuclease, which has been identified in multiple species. Non-limiting examples of Argonaute proteins include Thermus thermophilus Argonaute (TtAgo), Pyrococcus furiosus Argonaute (PfAgo), Natronobacterium gregoryi Argonaute (NgAgo), homologs thereof, or modified versions thereof. Each of these unique Argonaute endonucleases have a sequence encoding a DNA guide associated with them. For example, NgAgo (SEQ ID NO: 366) is a ssDNA-guided endonuclease that binds 5′-phosphorylated ssDNA of −24 nucleotides (gDNA) in length to guide it to a target site, and then makes DNA double-strand breaks at the gDNA site (Gao et al., Nat Biotechnol (2016) 34(7):768-73. PubMed PMID: 27136078; Swarts et al., Nature 507(7491) (2014):258-61; and Swarts et al, Nucleic Acids Res. 43(10) (2015):5120-9).

[0122] In some embodiments, the DNA binding domain of any of the base-editing systems provided herein is an Argonaute domain. In some embodiments, the Argonaute domain includes an amino acid sequence that is that is at least about 60% identical, at least about 65% identical, at least about 70% identical, at least about 72.5% identical, at least about 75% identical, at least about 77.5% identical, at least about 80% identical, at least about 82.5% identical, at least about 85% identical, at least about 87.5% identical, at least about 90% identical, at least about 91% identical, at least about 92% identical, at least about 93% identical, at least about 94% identical, at least about 95% identical, at least about 96% identical, at least about 97% identical, at least about 98% identical, at least about 99% identical, at least about 99.5% identical, or at least about 99.9% identical to SEQ ID NO: 366. In some embodiments, the Argonaute domain is SEQ ID NO: 366. In some embodiments, the Argonaute domain includes an amino acid sequence that has 1 or more, 2 or more, 3 or more, 4 or more, 5 or more, 6 or more, 7 or more, 8 or more, 9 or more, 10 or more, 11 or more, 12 or more, 13 or more, 14 or more, 15 or more, 16 or more, 17 or more, 18 or more, 19 or more, 20 or more, 21 or more, 22 or more, 23 or more, 24 or more, 25 or more, 26 or more, 27 or more, 28 or more, 29 or more, 30 or more, 31 or more, 32 or more, 33 or more, 34 or more, 35 or more, 36 or more, 37 or more, 38 or more, 39 or more, 40 or more, 41 or more, 42 or more, 43 or more, 44 or more, 45 or more, 46 or more, 47 or more, 48 or more, 49 or more, or 50 or more mutations compared to any one of the amino acid sequences set forth in SEQ ID NO: 366. In some embodiments, the Argonaute domain includes an amino acid sequence that has at least 10, at least 15, at least 20, at least 30, at least 40, at least 50, at least 60, at least 70, at least 80, at least 90, at least 100, at least 150, at least 200, at least 250, at least 300, at least 350, at least 400, at least 500, at least 600, at least 700, at least 800, at least 900, at least 1000, at least 1100, or at least 1200 identical contiguous amino acid residues as compared to any one of the amino acid sequences set forth in SEQ ID NO: 366. In some embodiments, the present disclosure relates to nuclease inactive NgAgo (dNgAgo). Without wishing to be bound by theory, using a dNgAgo can greatly expand the bases that may be targeted.

[0123] In some embodiments, proteins including portions of Argonaute are provided. In some embodiments, proteins including Argonaute or portions thereof are referred to as “Argonaute variants.” An Argonaute variant shares homology to Argonaute, or a portion thereof. For example, an Argonaute variant is at least 70% identical, at least 72.5% identical, at least 75% identical, at least 77.5% identical, at least 80% identical, at least 82.5% identical, at least 85% identical, at least 87.5% identical, at least 90% identical, at least 91% identical, at least 92% identical, at least 93% identical, at least 94% identical, at least 95% identical, at least 96% identical, at least 97% identical, at least 98% identical, at least 99% identical, at least 99.5% identical, or at least 99.9% identical to wild type Argonaute. In some embodiments, the Argonaute variant may have 1 or more, 2 or more, 3 or more, 4 or more, 5 or more, 6 or more, 7 or more, 8 or more, 9 or more, 10 or more, 11 or more, 12 or more, 13 or more, 14 or more, 15 or more, 16 or more, 17 or more, 18 or more, 19 or more, 20 or more, 21 or more, 22 or more, 23 or more, 24 or more, 25 or more, 26 or more, 27 or more, 28 or more, 29 or more, 30 or more, 31 or more, 32 or more, 33 or more, 34 or more, 35 or more, 36 or more, 37 or more, 38 or more, 39 or more, 40 or more, 41 or more, 42 or more, 43 or more, 44 or more, 45 or more, 46 or more, 47 or more, 48 or more, 49 or more, or 50 or more amino acid changes compared to wild type Argonaute. In some embodiments, the Argonaute variant includes a portion of Argonaute, such that the Argonaute portion is at least 70% identical, at least 72.5% identical, at least 75% identical, at least 77.5% identical, at least 80% identical, at least 82.5% identical, at least 85% identical, at least 87.5% identical, at least 90% identical, at least 91% identical, at least 92% identical, at least 93% identical, at least 94% identical, at least 95% identical, at least 96% identical, at least 97% identical, at least 98% identical, at least 99% identical, at least 99.5% identical, or at least 99.9% identical to the corresponding portion of wild type Argonaute. In some embodiments, the Argonaute portion is at least 50%, at least 55%, at least 60%, at least 65%, at least 70%, at least 72.5%, at least 75%, at least 77.5%, at least 80%, at least 82.5%, at least 85%, at least 87.5%, at least 90%, at least 91%, at least 92%, at least 93%, at least 94%, at least 95%, at least 96%, at least 97%, at least 98%, at least 99%, at least 99.5%, or at least 99.9% of the amino acid length of a corresponding wild type Argonaute. In some embodiments, the Argonaute portion is at least 100 amino acids in length. In some embodiments, the Argonaute portion is at least 100, at least 150, at least 200, at least 250, at least 300, at least 350, at least 400, at least 450, at least 500, at least 550, at least 600, at least 650, at least 700, at least 750, at least 800, at least 850, at least 900, at least 950, at least 1000, at least 1050, at least 1100, at least 1150, at least 1200, at least 1250, or at least 1300 amino acids in length. Additional suitable Argonaute domains (e.g., from other bacterial species) will be apparent to those of skill in the art based on this disclosure and knowledge in the field, and are within the scope of this disclosure.

[0124] The term “linker,” as used herein, refers to a chemical group or a molecule linking two molecules or moieties, e.g., two domains of a base-editing system, such as, for example, a nuclease inactive Cas domain (e.g., a nuclease inactive Cas9 domain or a nuclease inactive Cas12a domain) and a nucleic acid editing domain (e.g., a deaminase domain). In some embodiments, a linker joins a gRNA binding domain of an RNA-programmable nuclease, including a Cas nuclease domain (e.g., a Cas9 nuclease domain or a Cas12a nuclease domain), and the catalytic domain of a nucleic-acid editing protein. In some embodiments, a linker joins a dCas domain (e.g., a dCas9 domain or a dCas12a domain) and a nucleic-acid editing protein. Typically, the linker is positioned between, or flanked by, two groups, molecules, or other moieties and connected to each one via a covalent bond, thus connecting the two. In some embodiments, the linker is an amino acid or a plurality of amino acids (e.g., a peptide or protein). In some embodiments, the linker is an organic molecule, group, polymer, or chemical moiety. In some embodiments, the linker is in the range of 5-100 amino acids in length. In some embodiments, the linker is 5, 6, 7, 8, 9, 10, 11, 12, 13, 14, 15, 16, 17, 18, 19, 20, 21, 22, 23, 24, 25, 26, 27, 28, 29, 30, 30-35, 35-40, 40-45, 45-50, 50-60, 60-70, 70-80, 80-90, 90-100, 100-150, or 150-200 amino acids in length. Longer or shorter linkers are also contemplated.

[0125] In some embodiments, the linker includes (GGGS)ₙ(SEQ ID NO: 265), (GGGGS)ₙ (SEQ ID NO: 5), (G)ₙ, (EAAAK)ₙ(SEQ ID NO: 6), (GGS)ₙ, (SGGS)ₙ(SEQ ID NO: 1877), SGSETPGTSESATPES (SEQ ID NO: 7), or (XP)ₙ motif, or a combination of any of these, wherein n is independently an integer between 1 and 30, and wherein X is any amino acid. In some embodiments, the linker includes a (GGS)ₙ motif, wherein n is 1, 3, or 7. In some embodiments, the linker includes a (GGS)ₙ motif, wherein n is 1, 2, 3, 4, 5, 6, 7, 8, 9, 10, 11, 12, 13, 14, or 15. In some embodiments, the linker includes an amino acid sequence of SGSETPGTSESATPES (SEQ ID NO: 7). The length of the linker can influence the base to be edited, as illustrated in the Examples. For example, a linker of 3-amino-acid long (e.g., (GGS)₁) may give a 2-5, 2-4, 2-3, 3-4 base editing window relative to the PAM sequence for a Cas9 domain, while a 9-amino-acid linker (e.g., (GGS)₃ (SEQ ID NO: 596)) may give a 2-6, 2-5, 2-4, 2-3, 3-6, 3-5, 3-4, 4-6, 4-5, 5-6 base editing window relative to the PAM sequence. A 16-amino-acid linker (e.g., the XTEN linker) may give a 2-7, 2-6, 2-5, 2-4, 2-3, 3-7, 3-6, 3-5, 3-4, 4-7, 4-6, 4-5, 5-7, 5-6, 6-7 base window relative to the PAM sequence for a Cas9 domain with exceptionally strong activity, and a 21-amino-acid linker (e.g., (GGS)₇ (SEQ ID NO: 597)) may give a 3-8, 3-7, 3-6, 3-5, 3-4, 4-8, 4-7, 4-6, 4-5, 5-8, 5-7, 5-6, 6-8, 6-7, 7-8 base editing window relative to the PAM sequence. Varying linker length may allow the base-editing systems of the disclosure to edit nucleobases at different distances. It is to be understood that the linker lengths described as examples here are not meant to be limiting.

[0126] In some embodiments, the second protein includes an enzymatic domain. In some embodiments, the enzymatic domain is a nucleic acid editing domain. Such a nucleic acid editing domain may be, without limitation, a nuclease, a nickase, a recombinase, a deaminase, a methyltransferase, a methylase, an acetylase, or an acetyltransferase. Non-limiting exemplary binding domains that may be used in accordance with this disclosure include transcriptional activator domains and transcriptional repressor domains.

### Cytidine Deaminase Domains

[0127] In some aspects, the present disclosure relates to nucleic acid editing domains. In some embodiments, the nucleic acid editing domain can catalyze a C to U base change. In some embodiments, the nucleic acid editing domain is a deaminase domain. In some embodiments, the deaminase is a cytidine deaminase.

[0128] The term “deaminase” or “deaminase domain,” as used herein, refers to a protein or enzyme that catalyzes a deamination reaction. In some embodiments, the deaminase or deaminase domain is a cytidine deaminase, catalyzing the hydrolytic deamination of cytidine or deoxycytidine to uridine or deoxyuridine, respectively. In some embodiments, the deaminase or deaminase domain is a cytidine deaminase domain, catalyzing the hydrolytic deamination of cytosine to uracil.

[0129] In some embodiments, the deaminase or deaminase domain is a naturally-occurring deaminase from an organism, such as a human, chimpanzee, gorilla, monkey, cow, dog, rat, or mouse. In some embodiments, the deaminase or deaminase domain is a variant of a naturally-occurring deaminase from an organism, that does not occur in nature. For example, in some embodiments, the deaminase or deaminase domain is at least 50% identical, at least 55% identical, at least 60% identical, at least 65% identical, at least 70% identical, at least 72.5% identical, at least 75% identical, at least 77.5% identical, at least 80% identical, at least 82.5% identical, at least 85% identical, at least 87.5% identical, at least 90% identical, at least 91% identical, at least 92% identical, at least 93% identical, at least 94% identical, at least 95% identical, at least 96% identical, at least 97% identical, at least 98% identical, at least 99% identical, at least 99.5% identical, or at least 99.9% identical to a naturally-occurring deaminase from an organism.

[0130] One exemplary suitable type of nucleic acid editing domain is a cytidine deaminase, for example, of the APOBEC family. The apolipoprotein B mRNA-editing complex (APOBEC) family of cytidine deaminase enzymes encompasses eleven proteins that serve to initiate mutagenesis in a controlled and beneficial manner (Conticello, Genome Biol (2008) 9(6):229. PMID: 18598372). One family member, activation-induced cytidine deaminase (AID), is responsible for the maturation of antibodies by converting cytosines in ssDNA to uracils in a transcription-dependent, strand-biased fashion (Reynaud et al., Nat Immunol (2003) 4(7):631-8). The apolipoprotein B editing complex 3 (APOBEC3) enzyme provides protection to human cells against a certain HIV-1 strain via the deamination of cytosines in reverse-transcribed viral ssDNA (Bhagwat, DNA Repair (Amst) (2004) 3(1):85-9. PMID: 14697763). These proteins all require a Zn2+-coordinating motif (His-X-Glu-X₂₃₋₂₆-Pro-Cys-X₂₋₄-Cys; SEQ ID NO: 598) and bound water molecule for catalytic activity. The Glu residue acts to activate the water molecule to a zinc hydroxide for nucleophilic attack in the deamination reaction. Each family member preferentially deaminates at its own particular “hotspot”, ranging from WRC (W is A or T, R is A or G) for hAID, to TTC for hAPOBEC3F (Navaratnam et al., Int J Hematol (2006) 83(3): 195-200. PMID: 16720547). A recent crystal structure of the catalytic domain of APOBEC3G revealed a secondary structure of a five-stranded β-sheet core flanked by six α-helices, which is believed to be conserved across the entire family (Holden et al., Nature (2008) 456(7218): 121-4. PMID: 18849968). The active center loops have been shown to be responsible for both ssDNA binding and in determining “hotspot” identity (Chelico et al., J Biol Chem (2009) 284(41). 27761-5. PMID: 19684020). Overexpression of these enzymes has been linked to genomic instability and cancer, thus highlighting the importance of sequence-specific targeting (Pham et al., Biochemistry (2005) 44(8):2703-15. PMID 15723516).

[0131] In some embodiments, the deaminase is an apolipoprotein B mRNA-editing complex (APOBEC) family deaminase. In some embodiments, the deaminase is an APOBEC1 deaminase, an APOBEC2 deaminase, an APOBEC3 deaminase, or an APOBEC4 deaminase. In some embodiments, the deaminase is an APOBEC3A deaminase, an APOBEC3B deaminase, an APOBEC3C deaminase, an APOBEC3D deaminase, an APOBEC3E deaminase, an APOBEC3F deaminase, an APOBEC3G deaminase, or an APOBEC3H deaminase. In some embodiments, the deaminase is an activation-induced deaminase (AID). In some embodiments, the deaminase is a vertebrate deaminase. In some embodiments, the deaminase is an invertebrate deaminase. In some embodiments, the deaminase is a human, chimpanzee, gorilla, monkey, cow, dog, rat, or mouse deaminase. In some embodiments, the deaminase is a human deaminase. In some embodiments, the deaminase is a rat deaminase, e.g., rAPOBEC1. In some embodiments, the deaminase is a Petromyzon marinus cytidine deaminase 1 (pmCDA1). In some embodiments, the deminase is a human APOBEC3G (SEQ ID NO: 275). In some embodiments, the deaminase is a portion of the human APOBEC3G (SEQ ID NO: 1893). In some embodiments, the deaminase is a human APOBEC3G variant including a D316R_D317R mutation (SEQ ID NO: 1892). In some embodiments, the deaminase is a portion of the human APOBEC3G and including mutations corresponding to the D316R_D317R mutations in SEQ ID NO: 275 (SEQ ID NO: 1894).

[0132] In some embodiments, the nucleic acid editing domain is an APOBEC family deaminase domain and is at least 80% identical, at least 82.5% identical, at least 85% identical, at least 87.5% identical, at least 90% identical, at least 91% identical, at least 92% identical, at least 93% identical, at least 94% identical, at least 95% identical, at least 96% identical, at least 97% identical, at least 98% identical, at least 99% identical, at least 99.5% identical, or at least 99.9% identical to the deaminase domain of any one of SEQ ID NO: 266, SEQ ID NO: 267, SEQ ID NO: 268, SEQ ID NO: 269, SEQ ID NO: 270, SEQ ID NO: 271, SEQ ID NO: 272, SEQ ID NO: 273, SEQ ID NO: 274, SEQ ID NO: 275, SEQ ID NO: 276, SEQ ID NO: 277, SEQ ID NO: 278, SEQ ID NO: 279, SEQ ID NO: 280, SEQ ID NO: 281, SEQ ID NO: 282, SEQ ID NO: 283, SEQ ID NO: 284, SEQ ID NO: 607, SEQ ID NO: 608, SEQ ID NO: 609, SEQ ID NO: 610, SEQ ID NO: 1878, SEQ ID NO: 1879, SEQ ID NO: 1880, SEQ ID NO: 1881, SEQ ID NO: 1882, SEQ ID NO: 1883, SEQ ID NO: 1884, SEQ ID NO: 1885, SEQ ID NO: 1886, SEQ ID NO: 1887, SEQ ID NO: 1888, SEQ ID NO: 1889, SEQ ID NO: 1890, SEQ ID NO: 1891, SEQ ID NO: 1892, SEQ ID NO: 1893, or SEQ ID NO: 1894. In some embodiments, the nucleic acid editing domain includes the amino acid sequence of any one of SEQ ID NO: 266, SEQ ID NO: 267, SEQ ID NO: 268, SEQ ID NO: 269, SEQ ID NO: 270, SEQ ID NO: 271, SEQ ID NO: 272, SEQ ID NO: 273, SEQ ID NO: 274, SEQ ID NO: 275, SEQ ID NO: 276, SEQ ID NO: 277, SEQ ID NO: 278, SEQ ID NO: 279, SEQ ID NO: 280, SEQ ID NO: 281, SEQ ID NO: 282, SEQ ID NO: 283, SEQ ID NO: 284, SEQ ID NO: 607, SEQ ID NO: 608, SEQ ID NO: 609, SEQ ID NO: 610, SEQ ID NO: 1878, SEQ ID NO: 1879, SEQ ID NO: 1880, SEQ ID NO: 1881, SEQ ID NO: 1882, SEQ ID NO: 1883, SEQ ID NO: 1884, SEQ ID NO: 1885, SEQ ID NO: 1886, SEQ ID NO: 1887, SEQ ID NO: 1888, SEQ ID NO: 1889, SEQ ID NO: 1890, SEQ ID NO: 1891, SEQ ID NO: 1892, SEQ ID NO: 1893, or SEQ ID NO: 1894.

[0133] Some aspects of the disclosure are based on the recognition that modulating the deaminase domain catalytic activity of any of the base-editing systems provided herein, for example by making point mutations in the deaminase domain, affect the processivity of the base-editing systems. For example, mutations that reduce, but do not eliminate, the catalytic activity of a deaminase domain within a base-editing system can make it less likely that the deaminase domain will catalyze the deamination of a residue adjacent to a target residue, thereby narrowing the deamination window. The ability to narrow the deamination window may prevent unwanted deamination of residues adjacent of specific target residues, which may decrease or prevent off-target effects.

[0134] In some embodiments, any of the base-editing systems provided herein include a deaminase domain (e.g., a cytidine deaminase domain) that has reduced catalytic deaminase activity. In some embodiments, any of the base-editing systems provided herein include a deaminase domain (e.g., a cytidine deaminase domain) that has a reduced catalytic deaminase activity as compared to an appropriate control. For example, the appropriate control may be the deaminase activity of the deaminase prior to introducing one or more mutations into the deaminase. In other embodiments, the appropriate control may be a wild-type deaminase. In some embodiments, the appropriate control is a wild-type apolipoprotein B mRNA-editing complex (APOBEC) family deaminase. In some embodiments, the appropriate control is an APOBEC 1 deaminase, an APOBEC2 deaminase, an APOBEC3A deaminase, an APOBEC3B deaminase, an APOBEC3C deaminase, an APOBEC3D deaminase, an APOBEC3F deaminase, an APOBEC3G deaminase, or an APOBEC3H deaminase. In some embodiments, the appropriate control is an activation induced deaminase (AID). In some embodiments, the appropriate control is a cytidine deaminase 1 from Petromyzon marinus (pmCDA1). In some embodiments, the deaminase domain may be a deaminase domain that has at least 1%, at least 5%, at least 10%, at least 15%, at least 20%, at least 25%, at least 30%, at least 35%, at least 40%, at least 45%, at least 50%, at least 55%, at least 60%, at least 65%, at least 70%, at least 75%, at least 80%, at least 85%, at least 90%, or at least 95% less catalytic deaminase activity as compared to an appropriate control.

[0135] In some embodiments, any of the base-editing systems provided herein include an APOBEC deaminase including one or more mutations selected from the group of H121X, H122X, R126X, R126X, R118X, W90X, W90X, or R132X of rAPOBEC1 (SEQ ID NO: 284), or one or more corresponding mutations in another APOBEC deaminase, wherein X is any amino acid. In some embodiments, any of the base-editing systems provided herein include an APOBEC deaminase including one or more mutations selected from the group of H121R, H122R, R126A, R126E, R118A, W90A, W90Y, or R132E of rAPOBEC1 (SEQ ID NO: 284), or one or more corresponding mutations in another APOBEC deaminase.

[0136] In some embodiments, any of the base-editing systems provided herein include an APOBEC deaminase including one or more mutations selected from the group of D316X, D317X, R320X, R320X, R313X, W285X, W285X, or R326X of hAPOBEC3G (SEQ ID NO: 275), or one or more corresponding mutations in another APOBEC deaminase, wherein X is any amino acid. In some embodiments, any of the base-editing systems provided herein include an APOBEC deaminase including one or more mutations selected from the group of D316R, D317R, R320A, R320E, R313A, W285A, W285Y, or R326E of hAPOBEC3G (SEQ ID NO: 275), or one or more corresponding mutations in another APOBEC deaminase.

[0137] In some embodiments, any of the base-editing systems provided herein include an APOBEC deaminase including a H121R and a H122R mutation of rAPOBEC1 (SEQ ID NO: 284), or one or more corresponding mutations in another APOBEC deaminase. In some embodiments, any of the base-editing systems provided herein include an APOBEC deaminase including a R126A mutation of rAPOBEC1 (SEQ ID NO: 284), or one or more corresponding mutations in another APOBEC deaminase. In some embodiments, any of the base-editing systems provided herein include an APOBEC deaminase including a R126E mutation of rAPOBEC1 (SEQ ID NO: 284), or one or more corresponding mutations in another APOBEC deaminase. In some embodiments, any of the base-editing systems provided herein include an APOBEC deaminase including a R118A mutation of rAPOBEC1 (SEQ ID NO: 284), or one or more corresponding mutations in another APOBEC deaminase. In some embodiments, any of the base-editing systems provided herein include an APOBEC deaminase including a W90A mutation of rAPOBEC1 (SEQ ID NO: 284), or one or more corresponding mutations in another APOBEC deaminase. In some embodiments, any of the base-editing systems provided herein include an APOBEC deaminase including a W90Y mutation of rAPOBEC1 (SEQ ID NO: 284), or one or more corresponding mutations in another APOBEC deaminase. In some embodiments, any of the base-editing systems provided herein include an APOBEC deaminase including a R132E mutation of rAPOBEC1 (SEQ ID NO: 284), or one or more corresponding mutations in another APOBEC deaminase. In some embodiments, any of the base-editing systems provided herein include an APOBEC deaminase including a W90Y and a R126E mutation of rAPOBEC1 (SEQ ID NO: 284), or one or more corresponding mutations in another APOBEC deaminase. In some embodiments, any of the base-editing systems provided herein include an APOBEC deaminase including a R126E and a R132E mutation of rAPOBEC1 (SEQ ID NO: 284), or one or more corresponding mutations in another APOBEC deaminase. In some embodiments, any of the base-editing systems provided herein include an APOBEC deaminase including a W90Y and a R132E mutation of rAPOBEC1 (SEQ ID NO: 284), or one or more corresponding mutations in another APOBEC deaminase. In some embodiments, any of the base-editing systems provided herein include an APOBEC deaminase including a W90Y, R126E, and R132E mutation of rAPOBEC1 (SEQ ID NO: 284), or one or more corresponding mutations in another APOBEC deaminase.

[0138] In some embodiments, any of the base-editing systems provided herein include an APOBEC deaminase including a D316R and a D317R mutation of hAPOBEC3G (SEQ ID NO: 275), or one or more corresponding mutations in another APOBEC deaminase. In some embodiments, any of the base-editing systems provided herein include an APOBEC deaminase including a R320A mutation of hAPOBEC3G (SEQ ID NO: 275), or one or more corresponding mutations in another APOBEC deaminase. In some embodiments, any of the base-editing systems provided herein include an APOBEC deaminase including a R320E mutation of hAPOBEC3G (SEQ ID NO: 275), or one or more corresponding mutations in another APOBEC deaminase. In some embodiments, any of the base-editing systems provided herein include an APOBEC deaminase including a R313A mutation of hAPOBEC3G (SEQ ID NO: 275), or one or more corresponding mutations in another APOBEC deaminase. In some embodiments, any of the base-editing systems provided herein include an APOBEC deaminase including a W285A mutation of hAPOBEC3G (SEQ ID NO: 275), or one or more corresponding mutations in another APOBEC deaminase. In some embodiments, any of the base-editing systems provided herein include an APOBEC deaminase including a W285Y mutation of hAPOBEC3G (SEQ ID NO: 275), or one or more corresponding mutations in another APOBEC deaminase. In some embodiments, any of the base-editing systems provided herein include an APOBEC deaminase including a R326E mutation of hAPOBEC3G (SEQ ID NO: 275), or one or more corresponding mutations in another APOBEC deaminase. In some embodiments, any of the base-editing systems provided herein include an APOBEC deaminase including a W285Y and a R320E mutation of hAPOBEC3G (SEQ ID NO: 275), or one or more corresponding mutations in another APOBEC deaminase. In some embodiments, any of the base-editing systems provided herein include an APOBEC deaminase including a R320E and a R326E mutation of hAPOBEC3G (SEQ ID NO: 275), or one or more corresponding mutations in another APOBEC deaminase. In some embodiments, any of the base-editing systems provided herein include an APOBEC deaminase including a W285Y and a R326E mutation of hAPOBEC3G (SEQ ID NO: 275), or one or more corresponding mutations in another APOBEC deaminase. In some embodiments, any of the base-editing systems provided herein include an APOBEC deaminase including a W285Y, R320E, and R326E mutation of hAPOBEC3G (SEQ ID NO: 275), or one or more corresponding mutations in another APOBEC deaminase.

[0139] Some aspects of this disclosure relate to the recognition that the activity of cytidine deaminase enzymes such as APOBEC enzymes can be directed to a specific site in genomic DNA. Without wishing to be bound by any particular theory, advantages of using Cas9 as a recognition agent include (1) the sequence specificity of Cas9 can be easily altered by simply changing the sgRNA sequence; and (2) Cas9 binds to its target sequence by denaturing the dsDNA, resulting in a stretch of DNA that is single-stranded and therefore a viable substrate for the deaminase. Further, without wishing to be bound by any particular theory, advantages of using Cas12a as a recognition agent over Cas9 include (1) Cas12a variants have been described that operate at lower temperatures than available Cas9 variants, and are therefore potentially more useful in plant systems than Cas9 variants; and (2) Cas12a has a different editing window (bases available for modification) than Cas9 targeting the same DNA sequence with the same deaminase (e.g., due to differences in the position and orientation of the deaminase domain and the accessibility of the R-loop substrate). Further still, without wishing to be bound by any particular theory, advantages of using TALEs and ZFs include (1) the lack of any PAM preference, which enables editing at any base, and increased efficiency in regions of dense chromatin; and (2) TALEs and ZFs do not melt the DNA, and therefore must access targets in dsDNA, which changes the dynamics and likely sequence preferences of deamination. It should be understood that other catalytic domains, or catalytic domains from other deaminases, can also be used to generate base-editing systems with DNA binding domains (e.g., a Cas9 domain, a Cas12a domain, a Cas12h domain, a Cas12i domain, a CasX domain, a CasY domain, a C2c1 domain, a C2c2 domain, a C2c3 domain, a TALE domain, or a ZF domain), and that the disclosure is not limited in this regard.

[0140] In some embodiments, the deaminase domain and the DNA binding domain (e.g., a Cas9 domain, a Cas12a domain, a Cas12h domain, a Cas12i domain, a CasX domain, a CasY domain, a C2c1 domain, a C2c2 domain, a C2c3 domain, a TALE domain, or a ZF domain) are fused to each other via a linker. Various linker lengths and flexibilities between the deaminase domain (e.g., AID) and the DNA binding domain (e.g., a Cas9 domain, a Cas12a domain, a Cas12h domain, a Cas12i domain, a CasX domain, a CasY domain, a C2c1 domain, a C2c2 domain, a C2c3 domain, a TALE domain, or a ZF domain) can be employed (e.g., ranging from very flexible linkers of the form (GGGGS)ₙ(SEQ ID NO: 5), (GGS)ₙ, and (G)ₙ to more rigid linkers of the form (EAAAK)ₙ(SEQ ID NO: 6), (SGGS)ₙ(SEQ ID NO: 1877), SGSETPGTSESATPES (SEQ ID NO: 7) (see, e.g., Guilinger et al., Nat Biotechnol (2014) 32(6): 577-82) and (XP)ₙ)³⁶ in order to achieve the optimal length for deaminase activity for the specific application. In some embodiments, the linker includes a (GGS)ₙ motif, wherein n is 1, 3, or 7. In some embodiments, the linker includes a SGSETPGTSESATPES (SEQ ID NO: 7) motif.

[0141] Some exemplary suitable nucleic-acid editing domains, e.g., deaminases and deaminase domains, that can be fused to DNA binding domains (e.g., a Cas9 domain, a Cas12a domain, a Cas12h domain, a Cas12i domain, a CasX domain, a CasY domain, a C2c1 domain, a C2c2 domain, a C2c3 domain, a TALE domain, or a ZF domain) according to aspects of this disclosure are Human AID (SEQ ID NO: 266), Mouse AID (SEQ ID NO: 267), Dog AID (SEQ ID NO: 268), Bovine AID (SEQ ID NO: 269), Rat AID (SEQ ID NO: 1879), Mouse APOBEC-3 (SEQ ID NO: 270), Rat APOBEC-3 (SEQ ID NO: 271), Rhesus macaque APOBEC-3 G (SEQ ID NO: 272), Chimpanzee APOBEC-3 G (SEQ ID NO: 273), Green monkey APOBEC-3G (SEQ ID NO: 274), Human APOBEC-3G (SEQ ID NO: 275), Human APOBEC-3F (SEQ ID NO: 276), Human APOBEC-3B (SEQ ID NO: 277), Rat APOBEC-3B (SEQ ID NO: 1883), Bovine APOBEC-3B (SEQ ID NO: 1884), Chimpanzee APOBEC-3B (SEQ ID NO: 1885), Human APOBEC-3C (SEQ ID NO: 278), Gorilla APOBEC3C (SEQ ID NO: 1880), Human APOBEC-3A (SEQ ID NO: 279), Rhesus macaque APOBEC-3A (SEQ ID NO: 1881), Bovine APOBEC-3A (SEQ ID NO: 1882), Human APOBEC-3H (SEQ ID NO: 280), Rhesus macaque APOBEC-3H (SEQ ID NO: 1886), Human APOBEC-3D (SEQ ID NO: 281), Human APOBEC-1 (SEQ ID NO: 282), Mouse APOBEC-1 (SEQ ID NO: 283), Rat APOBEC-1 (SEQ ID NO: 284), Human APOBEC-2 (SEQ ID NO: 1887), Mouse APOBEC-2 (SEQ ID NO: 1888), Rat APOBEC-2: (SEQ ID NO: 1889), Bovine APOBEC-2 (SEQ ID NO: 1890), Petromyzon marinus CDA1 (pmCDA1) (SEQ ID NO: 1891), Human APOBEC3G D316R_D317R (SEQ ID NO: 1892), Human APOBEC3G chain A (SEQ ID NO: 1893), Human APOBEC3G chain A D120R_D121R (SEQ ID NO: 1894). It should be understood that, in some embodiments, the active domain of the respective sequence can be used, e.g., the domain without a localizing signal (nuclear localization sequence, without nuclear export signal, cytoplasmic localizing signal).

[0142] In some embodiments, base-editing systems as provided herein include the full-length amino acid of a nucleic acid editing enzyme, e.g., one of the sequences provided above. In other embodiments, however, base-editing systems as provided herein do not include a full-length sequence of a nucleic acid editing enzyme, but only a portion thereof. For example, in some embodiments, a base-editing system provided herein includes a DNA binding domain (e.g., a Cas9 domain, a Cas12a domain, a Cas12h domain, a Cas12i domain, a CasX domain, a CasY domain, a C2c1 domain, a C2c2 domain, a C2c3 domain, an Argonaute domain, a TALE domain, or a ZF domain) and a portion of a nucleic acid editing enzyme. In some embodiments, the portion of the nucleic acid editing enzyme includes a nucleic acid editing motif. In some embodiments, the nucleic acid editing motif is at least 80% identical, at least 82.5% identical, at least 85% identical, at least 87.5% identical, at least 90% identical, at least 91% identical, at least 92% identical, at least 93% identical, at least 94% identical, at least 95% identical, at least 96% identical, at least 97% identical, at least 98% identical, at least 99% identical, at least 99.5% identical, or at least 99.9% to SEQ ID NO: 326, SEQ ID NO: 327, SEQ ID NO: 328, SEQ ID NO: 329, SEQ ID NO: 330, SEQ ID NO: 331, SEQ ID NO: 332, SEQ ID NO: 333, SEQ ID NO: 334, SEQ ID NO: 335, SEQ ID NO: 336, SEQ ID NO: 337, SEQ ID NO: 338, SEQ ID NO: 339, SEQ ID NO: 340, SEQ ID NO: 341, SEQ ID NO: 342, SEQ ID NO: 343, SEQ ID NO: 344, SEQ ID NO: 345, SEQ ID NO: 346, SEQ ID NO: 347, SEQ ID NO: 348, or SEQ ID NO: 349. In some embodiments, the nucleic acid editing motif is SEQ ID NO: 326, SEQ ID NO: 327, SEQ ID NO: 328, SEQ ID NO: 329, SEQ ID NO: 330, SEQ ID NO: 331, SEQ ID NO: 332, SEQ ID NO: 333, SEQ ID NO: 334, SEQ ID NO: 335, SEQ ID NO: 336, SEQ ID NO: 337, SEQ ID NO: 338, SEQ ID NO: 339, SEQ ID NO: 340, SEQ ID NO: 341, SEQ ID NO: 342, SEQ ID NO: 343, SEQ ID NO: 344, SEQ ID NO: 345, SEQ ID NO: 346, SEQ ID NO: 347, SEQ ID NO: 348, or SEQ ID NO: 349. Additional suitable sequences of such motifs will be apparent to those of skill in the art.

[0143] Additional suitable nucleic-acid editing enzyme sequences, e.g., deaminase enzyme and domain sequences, that can be used according to aspects of this invention, e.g., that can be fused to a nuclease inactive DNA binding domain (e.g., a nuclease inactive Cas9 (dCas9), a nuclease inactive Cas12a (dCas12a), a TALE, or a ZF), will be apparent to those of skill in the art based on this disclosure. In some embodiments, such additional enzyme sequences include deaminase enzyme or deaminase domain sequences that are at least 70% identical, at least 72.5% identical, at least 75% identical, at least 77.5% identical, at least 80% identical, at least 82.5% identical, at least 85% identical, at least 87.5% identical, at least 90% identical, at least 91% identical, at least 92% identical, at least 93% identical, at least 94% identical, at least 95% identical, at least 96% identical, at least 97% identical, at least 98% identical, or at least 99% identical to the sequences provided herein.

[0144] Additional suitable strategies for generating base-editing systems including a DNA binding domain and a deaminase domain will be apparent to those of skill in the art based on this disclosure in combination with the general knowledge in the art. Suitable strategies for generating base-editing systems according to aspects of this disclosure using linkers or without the use of linkers will also be apparent to those of skill in the art in view of the instant disclosure and the knowledge in the art. For example, Gilbert et al., Cell (2013) 154(2):442-51, showed that C-terminal fusions of Cas9 with VP64 using 2 NLS's as a linker (SPKKKRKVEAS, SEQ ID NO: 599), can be employed for transcriptional activation. Mali et al, CAS9 transcriptional activators for target specificity screening and paired nickases for cooperative genome engineering. Nat Biotechnol. 2013; 31(9):833-8, reported that C-terminal fusions with VP64 without linker can be employed for transcriptional activation. And Maeder et al., Nat Methods (2013) 10: 977-979, reported that C-terminal fusions with VP64 using a Gly4Ser (SEQ ID NO: 5) linker can be used as transcriptional activators. Recently, dCas9-FokI nuclease fusions have successfully been generated and exhibit improved enzymatic specificity as compared to the parental Cas9 enzyme (In Guilinger et al., Nat. Biotechnol (2014) 32(6): 577-82, and in Tsai et al., Nat Biotechnol (2014) 32(6):569-76. PMID: 24770325, a SGSETPGTSESATPES (SEQ ID NO: 7) or a GGGGS (SEQ ID NO: 5) linker was used in FokI-dCas9 fusion proteins, respectively).

### Non-Protein Uracil-DNA Glycosylase Inhibitors

[0145] In some aspects, the present disclosure relates to non-protein uracil-DNA glycosylase inhibitors (npUGI), also known as uracil glycosylase inhibitors. In some embodiments, the npUGI is selected from the group including an organochemical inhibitor of uracil glycosylase, a nucleic acid based inhibitor of uracil-DNA glycosylase, or a RNA guide of a dCas nuclease (e.g., dCas9, dCas12a, dCas12h, dCas12i, dCasX, dCasY, dC2c1, dC2c2, or dC2c3) with a poly dU (deoxy-Uracil) extension. It is to be understood that “non-protein” means without one or more amino acid, polypeptide, or protein components (i.e., without any amino acid, polypeptide, or protein components).

[0146] Without wishing to be bound by any particular theory, cellular DNA-repair response to the presence of U:G heteroduplex DNA may decrease nucleobase editing efficiency in cells. For example, uracil-DNA glycosylase (UDG) catalyzes removal of U from DNA in cells, which may initiate base excision repair, with reversion of the U:G pair to a C:G pair as the most common outcome. As demonstrated in the Examples below, non-protein uracil-DNA glycosylase inhibitors (npUGI) inhibit UDG activity (e.g., completely inhibit UDG activity). It should be understood that the use of a npUGI increases the editing efficiency of a nucleic acid editing domain that is capable of catalyzing a C to U change. For example, systems including a npUGI may be more efficient in deaminating C residues.

[0147] In some embodiments, the npUGI is an organochemical inhibitor of UDG. For example, an organochemical inhibitor of UDG may be a small molecule inhibitor of UDG.

[0148] In some embodiments, the npUGI is a nucleic acid based inhibitor of UDG. For example, a RNA molecule, an antisense oligonucleotide molecule, a microRNA (miRNA) molecule, a short hairpin RNA (shRNA) molecule, a double stranded RNA (dsRNA) molecule, a small interfering RNA (siRNA) molecule. In some embodiments, the npUGI is a DNA molecule capable of inhibiting a uracil-DNA glycosylase base-excision repair enzyme. In some embodiments, the npUGI is a RNA-DNA chimera capable of inhibiting a uracil-DNA glycosylase base-excision repair enzyme.

[0149] In some embodiments, the npUGI is a RNA guide of a dCas nuclease with a poly dU (deoxy-Uracil) extension. For example, this may be a poly deoxy-uracil (dU) extension added to guide RNA capable of inhibiting an UDG.

[0150] In some embodiments, the npUGI inhibits UDG in plants. In some embodiments, the npUGI inhibits the plant UDGs of Table 1. In some embodiments, the npUGI inhibits animal UDGs.

### Small Molecule Inhibitors of Uracil-DNA Glycosylase

[0151] In some aspects, the present disclosure relates to base-editing systems including small molecule inhibitors of UDG. In some embodiments, the small molecule inhibitors include a compound of formula (I) or a pharmaceutically acceptable salt thereof:

[chemical structure]

[0152] R¹ is H, a furanose carbohydrate, or a derivative thereof, a pyranose carbohydrate, or a derivative thereof, a carbohydrate mimetic, C₁₋₁₆alkyl, C₁₋₁₆alkenyl, C₁₋₁₆alkynyl, C₁₋₁₆alkoxy, or C₆₋₂₀aryl, wherein the furanose carbohydrate, or a derivative thereof, pyranose carbohydrate, or a derivative thereof, carbohydrate mimetic, C₁₋₁₂alkyl, C₁₋₁₂alkenyl, C₁₋₁₂alkynyl, C₁₋₁₂alkoxy, or C₆₋₂₀aryl is independently optionally substituted with one or more substituents selected from the group of hydroxyl, halo, cyano, NO₂, N(R⁴)(R⁵), C₁₋₁₂alkoxy, or C₆₋₂₀aryl, wherein the C₆₋₂₀aryl is further optionally substituted with one or more substituents selected from the group of C₁₋₁₂alkyl, C₁₋₁₂alkenyl, C₁₋₁₂alkynyl, C₁₋₁₂alkoxy, hydroxyl, halo, cyano, NO₂, or N(R⁴)(R⁵).

[0153] L is O, S, or NR³, wherein R³ is H or C₁₋₁₆alkyl.

[0154] R² is H, N(R⁴)(R⁵), or C₆₋₂₀aryl, wherein the C₆₋₂₀aryl is independently substituted with one or more substituents selected from the group of C₁₋₁₆alkyl, C₁₋₁₆alkenyl, C₁₋₁₆alkynyl, or C₁₋₁₆alkoxy.

[0155] R⁴ and R⁵ are each independently H or C₆₋₂₀aryl.

[0156] R⁶ is H or halo.

[0157] In some embodiments of the compound of formula (I), or a pharmaceutically acceptable salt thereof, R¹ is H.

[0158] In some embodiments of the compound of formula (I), or a pharmaceutically acceptable salt thereof, R¹ is C₁₋₁₆alkyl, wherein the C₁₋₁₆alkyl is optionally substituted with one or more substituents selected from the group of hydroxyl, halo, cyano, NO₂, N(R⁴)(R⁵), C₁₋₁₆alkoxy, or C₆₋₂₀aryl, wherein the C₆₋₂₀aryl is further optionally substituted with one or more substituents selected from the group of C₁₋₁₆alkyl, C₁₋₁₆alkenyl, C₁₋₁₆alkynyl, C₁₋₁₆alkoxy, hydroxyl, halo, cyano, NO₂, or N(R⁴)(R⁵), wherein R₄ and R₅ are each independently H or C₆₋₂₀aryl. In some embodiments of the compound of formula (I), or a pharmaceutically acceptable salt thereof, L is *—N(R³)—**, wherein ** indicates the point of attachment to the R² moiety and * indicates the point of attachment to the remainder of the molecule. In certain variations, R³ is H. In other variations, R³ is C₁₋₁₆alkyl. In other embodiments, L is —O—.

[0159] In some embodiments of the compound of formula (I), or a pharmaceutically acceptable salt thereof, R² is C₆₋₂₀aryl, wherein the C₆₋₂₀aryl is independently substituted with one or more substituents selected from the group of C₁₋₁₆alkyl, C₁₋₁₆alkenyl, C₁₋₁₆alkynyl, or C₁₋₁₆alkoxy.

[0160] In some embodiments of the compound of formula (I), or a pharmaceutically acceptable salt thereof, R⁶ is H. In other embodiments, R⁶ is halo. In some embodiments, R⁶ is fluorine. In some embodiments, R⁶ is chlorine. In other embodiments, R⁶ is bromine. In still other embodiments, R⁶ is iodine.

[0161] In some embodiments, the compound of formula (I) is, for example:

1-methoxyethyl-6-(p-n-octylanilino)uracil
6-(phenylhydrazino)uracil
6-(4-octylphenoxy)uracil
1-methyl-6-(4-hexylanilino)uracil
1-ethyl-6-(4-hexylanilino)uracil
1-propyl-6-(4-hexylanilino)uracil
1-(2-hydroxyethyl)-6-(4-octylanilino)uracil
1-(2-methoxyethyl)-6-(4-hexylanilino)uracil

or a pharmaceutically acceptable salt thereof.

[0162] In some embodiments, the base-editing system including a small molecule inhibitor of any of the above embodiments further includes a pharmaceutically acceptable carrier, diluent, or excipient.

[0163] In some embodiments, the base-editing system including a small molecule inhibitor including the compound of formula (I) is incorporated into a macromolecule. In certain embodiments, the macromolecule is an oligonucleotide.

[0164] Additional details regarding small molecule inhibitors of UDG may be found in Suksangpleng et al., Malar J (2014) 17; 13:149. PMID: 24742318; Pregnolato et al., Nucleosides Nucleotides (1999) 18(4-5):709-11. PMID: 10432670; Sun et al., J Med Chem (1999) 42(13):2344-50. PMID: 10395474; Focher et al., Biochem J. (1993) 15; 292 (Pt 3):883-9. PMID: 8391260; Argnani et al., Virology (1995) 211(1):307-11. PMID: 7645226; Hendricks et al., J Chem Inf Model (2014) 54(12):3362-72. PMID: 25369428; Huang et al., J Am Chem Soc (2009) 131(4): 1344-1345. PMID: 19173657. Krosky et al., Nucleic Acids Res (2006) 34(20):5872-9. PMID: 17062624; Jiang et al., Bioorg Med Chem (2006) 14(16):5666-72. PMID: 16678429; Chung et al., Nat Chemm Biol (2009) 5(6):407-13. PMID: 19396178; Braunheim et al., Methods Enzymol (1999) 308: 398-426. PMID: 10507012; Jiang et al., Bioorg Chem (2004) 32(4):244-62. PMID: 15210339; Purmal et al., Biochemistry (1996) 35(51):16630-7. PMID: 8987998; Rosler et al., Nucleosides Nucleotides Nucelic Acids (2000) 19(10-12):1505-16. PMID: 11200255; Mikalkenas et al., J Enzyme Inhib Med Chem (2018) 33(1): 384-389. PMID: 29372656; Ono et al., Nucleic Acids Symp Ser (2000) (44):127-8. PMID: 12903301; and Kubareva et al., Gene (1995) 157(1-2):167-71. PMID: 7607485.

[0165] “Furanose carbohydrate” refers to a carbohydrate that includes a five-membered ring system containing four carbon atoms and one oxygen atom. The ring is saturated in that it contains no carbon-carbon double bonds.

[0166] “Pyranose carbohydrate” refers to a carbohydrate that includes a six-membered ring system containing five carbon atoms and one oxygen atom. The ring is saturated in that it contains no carbon-carbon double bonds.

[0167] In some embodiments, examples of furanose carbohydrates, pyranose carbohydrates, and derivatives and mimetics thereof, include, but are not limited to:

2-((2R,3S,4R,5R)-3,4-dihydroxy-5-
(hydroxymethyl)tetrahydrofuran-2-
yl)thiazole-4-carboxamide
1-((2R,4R,5S)-4-azido-5-
(hydroxymethyl)tetrahydrofuran-2-
yl)-5-methylpyrimidine-2,4(1H,3H)-
dione
(2R,3S,4R,5R)-2-(6-amino-9H-purin-9-
yl)-5-
(hydroxymethyl)tetrahydrofuran-3,4-
diol
(1S,2R,3R,5R)-3-(2-amino-6-
(cyclopropylamino)-9H-purin-9-yl)-5-
(hydroxymethyl)cyclopentane-1,2-diol
(2S,3S,4R,5R)-2-(7-amino-1H-
pyrazolo[4,3-d]pyrimidin-3-yl)-5-
(hydroxymethyl)tetrahydrofuran-3,4-
diol
3-((2S,3S,4R,5R)-3,4-dihydroxy-5-
(hydroxymethyl)tetrahydrofuran-2-
yl)-1H-pyrrole-2,5-dione
1-((2R,3S,4R,5R)-3,4-dihydroxy-5-
(hydroxymethyl)tetrahydrofuran-2-
yl)-5-fluoropyrimidine-2,4(1H,3H)-
dione
2-((1R,4S,5R)-4,5-dihydroxy-3-
(hydroxymethyl)cyclopent-2-en-1-yl)-
3H-1,2l4,4-triazole-5-carboxamide
(1R,2S,5R)-5-(6-amino-9H-purin-9-yl)-
3-(hydroxymethyl)cyclopent-3-ene-
1,2-diol
4-amino-1-((2R,5S)-2-
(hydroxymethyl)-1,3-oxathiolan-5-
yl)pyrimidin-2(1H)-one
(R)-4-amino-1-(4-hydroxybuta-1,2-
dien-1-yl)pyrimidin-2(1H)-one
((2S,3R,4R)-4-(6-amino-9H-purin-9-
yl)oxetane-2,3-diyl)dimethanol
3-((2R,3R,3aS,4aS,5S,6S,7S,8aR,9aR)-
2-(6-amino-9H-purin-9-yl)-4a,5,6-
trihydroxy-3-
methoxydecahydrofuro[3,2-
b]pyrano[2,3-e]pyran-7-yl)-3l5-
pentan-3-one
2-amino-9-((2-
hydroxyethoxy)methyl)-7l2,9l4-purin-
6(1H)-one
(E)-N-((2S,3R,4R,5R)-2-
(((2R,3R,4R,5S,6R)-3-acetamido-4,5-
dihydroxy-6-
(hydroxymethyl)tetrahydro-2H-pyran-
2-yl)oxy)-6-((R)-2-((2R,3S,4R,5R)-5-
(2,4-dioxo-3,4-dihydropyrimidin-
1(2H)-yl)-3,4-
dihydroxytetrahydrofuran-2-yl)-2-
hydroxyethyl)-4,5-
dihydroxytetrahydro-2H-pyran-3-yl)-
13-methyltetradec-2-enamide

[0168] “Alkyl” refers to a saturated linear (i.e., unbranched) or branched univalent hydrocarbon chain or combination thereof, having the number of carbon atoms designated (i.e., C₁-C₁₀ means one to ten carbon atoms). Particular alkyl groups are those having 1 to 20 carbon atoms (a “C₁₋₂₀alkyl”), having 1 to 16 carbon atoms (a “C₁₋₆alkyl”), having 1 to 10 carbon atoms (a “C₁₋₁₀alkyl”), having 6 to 10 carbon atoms (a “C₆₋₁₀alkyl”), having 1 to 6 carbon atoms (a “C₁₋₆alkyl”), having 2 to 6 carbon atoms (a “C₂₋₆alkyl”), or having 1 to 4 carbon atoms (a “C₁₋₄alkyl”). Examples of alkyl groups include, but are not limited to, groups such as methyl, ethyl, n-propyl, isopropyl, n-butyl, t-butyl, isobutyl, sec-butyl, n-pentyl, n-hexyl, n-heptyl, n-octyl, n-nonyl, n-decyl, and the like.

[0169] “Alkenyl” refers to a straight or branched chain alkyl or substituted alkyl group as defined elsewhere herein having at least one carbon-carbon double bond. Alkenyl groups may be optionally substituted.

[0170] “Alkynyl” refers to and includes a straight or branched chain alkyl or substituted alkyl group as defined elsewhere herein having at least one carbon-carbon triple bond. Alkynyl groups may be optionally substituted.

[0171] “Alkoxy” refers to the group R—O—, where R is alkyl; and includes, by way of example, methoxy, ethoxy, n-propoxy, iso-propoxy, n-butoxy, tert-butoxy, sec-butoxy, n-pentoxy, n-hexyloxy, 1,2-dimethylbutoxy, and the like.

[0172] “Aryl” or “Ar” refers to an unsaturated aromatic carbocyclic group having a single ring (e.g., phenyl) or multiple condensed rings (e.g., naphthyl or anthryl), in which the condensed rings may or may not be aromatic. Particular aryl groups are those having from 6 to 14 annular carbon atoms (a “C₆-C₁₄ aryl”). An aryl group having more than one ring where at least one ring is non-aromatic may be connected to the parent structure at either an aromatic ring position or at a non-aromatic ring position. In one variation, an aryl group having more than one ring where at least one ring is non-aromatic is connected to the parent structure at an aromatic ring position.

[0173] “Halo” or “halogen” refers to elements of the Group 17 series having atomic number 9 to 85. Preferred halo groups include the radicals of fluorine, chlorine, bromine and iodine. Where a residue is substituted with more than one halogen, it may be referred to by using a prefix corresponding to the number of halogen moieties attached, e.g., dihaloaryl, dihaloalkyl, trihaloaryl etc. refer to aryl and alkyl substituted with two (“di”) or three (“tri”) halo groups, which may be but are not necessarily the same halogen; thus 4-chloro-3-fluorophenyl is within the scope of dihaloaryl. An alkyl group in which each hydrogen is replaced with a halo group is referred to as a “perhaloalkyl.” A preferred perhaloalkyl group is trifluoromethyl (—CF₃). Similarly, “perhaloalkoxy” refers to an alkoxy group in which a halogen takes the place of each H in the hydrocarbon making up the alkyl moiety of the alkoxy group. An example of a perhaloalkoxy group is trifluoromethoxy (—OCF₃).

[0174] “Cyano” refers to a —C≡N group.

[0175] A “pharmaceutically acceptable carrier” refers to an ingredient in a pharmaceutical formulation, other than an active ingredient, which is nontoxic to a subject. A pharmaceutically acceptable carrier includes, but is not limited to, a buffer, excipient, diluent, stabilizer, or preservative.

[0176] “Oligonucleotide” refers to polynucleotides of between about 5 and about 100 nucleotides of single- or double-stranded DNA. Oligonucleotides are also known as oligomers or oligos and may be isolated from genes, or chemically synthesized by methods known in the art. A “primer” refers to an oligonucleotide, usually single-stranded, that provides a 3′-hydroxyl end for the initiation of enzyme-mediated nucleic acid synthesis. The primer sequence need not reflect the exact sequence of the template. “PCR primers” refer to primers used in “polymerase chain reaction” or “PCR,” a method for amplifying a DNA base sequence using a heat-stable polymerase such as Taq polymerase, and two oligonucleotide primers, one complementary to the (+)-strand at one end of the sequence to be amplified and the other complementary to the (−)-strand at the other end. Because the newly synthesized DNA strands can subsequently serve as additional templates for the same primer sequences, successive rounds of primer annealing, strand elongation, and dissociation produce exponential and highly specific amplification of the desired sequence. PCR also can be used to detect the existence of the defined sequence in a DNA sample.

### Nucleic Acid Inhibitors of Uracil-DNA Glycosylase

[0177] In some embodiments, the present disclosure relates to nucleic acid based inhibitors of uracil-DNA glycosylase. In some embodiments, the nucleic acid based inhibitor of uracil-DNA glycosylase may be a RNA molecule, an antisense oligonucleotide, a DNA molecule, or a RNA/DNA chimera molecule. In some embodiments, the RNA molecule is a double-stranded RNA (dsRNA) molecule, a small interfering RNA (siRNA) molecule, a microRNA (miRNA) molecule, or a short hairpin RNA (shRNA) molecule. In some embodiments, the nucleic acid uracil-DNA glycosylase inhibitory molecule (e.g., a dsRNA molecule, a siRNA molecule, a miRNA molecule, a shRNA molecule, a DNA molecule, or a RNA/DNA chimera molecule) knocks down the non-exhaustive list of uracil-DNA glycosylase targets identified in Table 1. In some embodiments, additional target sequences can be accessed in standard genome databases (e.g., NCBI, Pfam, SCOP, Interior) for most species of interest. In some embodiments, the RNA molecule includes a nucleic acid sequence that is at least 60% identical, at least 65% identical, at least 70% identical, at least 72.5% identical, at least 75% identical, at least 77.5% identical, at least 80% identical, at least 82.5% identical, at least 85% identical, at least 87.5% identical, at least 90% identical, at least 91% identical, at least 92% identical, at least 93% identical, at least 94% identical, at least 95% identical, at least 96% identical, at least 97% identical, at least 98% identical, at least 99% identical, at least 99.5% identical, or at least 99.9% identical to any one of the nucleic acid sequences of SEQ ID NO: 373, SEQ ID NO: 374, SEQ ID NO: 375, SEQ ID NO: 376, SEQ ID NO: 377, SEQ ID NO: 378, or SEQ ID NO: 379. In some embodiments, the RNA molecule includes any one of the nucleic acids of SEQ ID NO: 373, SEQ ID NO: 374, SEQ ID NO: 375, SEQ ID NO: 376, SEQ ID NO: 377, SEQ ID NO: 378, or SEQ ID NO: 379. In some embodiments, the RNA molecule includes a nucleic acid sequence that has 1 or more, 2 or more, 3 or more, 4 or more, 5 or more, 6 or more, 7 or more, 8 or more, 9 or more, 10 or more, 11 or more, 12 or more, 13 or more, 14 or more, 15 or more, 16 or more, 17 or more, 18 or more, 19 or more, 20 or more, 21 or more, 22 or more, 23 or more, 24 or more, 25 or more, 26 or more, 27 or more, 28 or more, 29 or more, 30 or more, 31 or more, 32 or more, 33 or more, 34 or more, 35 or more, 36 or more, 37 or more, 38 or more, 39 or more, 40 or more, 41 or more, 42 or more, 43 or more, 44 or more, 45 or more, 46 or more, 47 or more, 48 or more, 49 or more, or 50 or more mutations compared to any one of the nucleic acid sequences set forth in SEQ ID NO: 373, SEQ ID NO: 374, SEQ ID NO: 375, SEQ ID NO: 376, SEQ ID NO: 377, SEQ ID NO: 378, or SEQ ID NO: 379. In some embodiments, the RNA molecule includes a nucleic acid sequence that has at least 10, at least 15, at least 20, at least 30, at least 40, at least 50, at least 60, at least 70, at least 80, at least 90, at least 100, at least 150, at least 200, at least 250, at least 300, at least 350, at least 400, at least 500, at least 600, at least 700, at least 800, at least 900, at least 1000, at least 1100, or at least 1200 identical contiguous nucleic acid residues as compared to any one of the nucleic acid sequences set forth in SEQ ID NO: 373, SEQ ID NO: 374, SEQ ID NO: 375, SEQ ID NO: 376, SEQ ID NO: 377, SEQ ID NO: 378, or SEQ ID NO: 379.

[0178] In some embodiments, the DNA molecule includes a nucleic acid sequence that is at least 60% identical, at least 65% identical, at least 70% identical, at least 72.5% identical, at least 75% identical, at least 77.5% identical, at least 80% identical, at least 82.5% identical, at least 85% identical, at least 87.5% identical, at least 90% identical, at least 91% identical, at least 92% identical, at least 93% identical, at least 94% identical, at least 95% identical, at least 96% identical, at least 97% identical, at least 98% identical, at least 99% identical, at least 99.5% identical, or at least 99.9% identical to any one of the nucleic acid sequences set forth in SEQ ID NO: 373, SEQ ID NO: 374, SEQ ID NO: 375, SEQ ID NO: 376, SEQ ID NO: 377, SEQ ID NO: 378, or SEQ ID NO: 379. In some embodiments, the DNA molecule includes any one of the nucleic acids of SEQ ID NO: 373, SEQ ID NO: 374, SEQ ID NO: 375, SEQ ID NO: 376, SEQ ID NO: 377, SEQ ID NO: 378, or SEQ ID NO: 379. In some embodiments, the DNA molecule includes a nucleic acid sequence that has 1 or more, 2 or more, 3 or more, 4 or more, 5 or more, 6 or more, 7 or more, 8 or more, 9 or more, 10 or more, 11 or more, 12 or more, 13 or more, 14 or more, 15 or more, 16 or more, 17 or more, 18 or more, 19 or more, 20 or more, 21 or more, 22 or more, 23 or more, 24 or more, 25 or more, 26 or more, 27 or more, 28 or more, 29 or more, 30 or more, 31 or more, 32 or more, 33 or more, 34 or more, 35 or more, 36 or more, 37 or more, 38 or more, 39 or more, 40 or more, 41 or more, 42 or more, 43 or more, 44 or more, 45 or more, 46 or more, 47 or more, 48 or more, 49 or more, or 50 or more mutations compared to any one of the nucleic acid sequences set forth in SEQ ID NO: 373, SEQ ID NO: 374, SEQ ID NO: 375, SEQ ID NO: 376, SEQ ID NO: 377, SEQ ID NO: 378, or SEQ ID NO: 379. In some embodiments, the DNA molecule includes a nucleic acid sequence that has at least 10, at least 15, at least 20, at least 30, at least 40, at least 50, at least 60, at least 70, at least 80, at least 90, at least 100, at least 150, at least 200, at least 250, at least 300, at least 350, at least 400, at least 500, at least 600, at least 700, at least 800, at least 900, at least 1000, at least 1100, or at least 1200 identical contiguous nucleic acid residues as compared to any one of the nucleic acid sequences set forth in SEQ ID NO: 373, SEQ ID NO: 374, SEQ ID NO: 375, SEQ ID NO: 376, SEQ ID NO: 377, SEQ ID NO: 378, or SEQ ID NO: 379.

[0179] In some embodiments, the RNA/DNA chimera molecule includes a nucleic acid sequence that is at least 60% identical, at least 65% identical, at least 70% identical, at least 72.5% identical, at least 75% identical, at least 77.5% identical, at least 80% identical, at least 82.5% identical, at least 85% identical, at least 87.5% identical, at least 90% identical, at least 91% identical, at least 92% identical, at least 93% identical, at least 94% identical, at least 95% identical, at least 96% identical, at least 97% identical, at least 98% identical, at least 99% identical, at least 99.5% identical, or at least 99.9% identical to any one of the nucleic acid sequences set forth in SEQ ID NO: 373, SEQ ID NO: 374, SEQ ID NO: 375, SEQ ID NO: 376, SEQ ID NO: 377, SEQ ID NO: 378, or SEQ ID NO: 379. In some embodiments, the RNA/DNA chimera molecule includes any one of the nucleic acids of SEQ ID NO: 373, SEQ ID NO: 374, SEQ ID NO: 375, SEQ ID NO: 376, SEQ ID NO: 377, SEQ ID NO: 378, or SEQ ID NO: 379. In some embodiments, the RNA/DNA chimera molecule includes a nucleic acid sequence that has 1 or more, 2 or more, 3 or more, 4 or more, 5 or more, 6 or more, 7 or more, 8 or more, 9 or more, 10 or more, 11 or more, 12 or more, 13 or more, 14 or more, 15 or more, 16 or more, 17 or more, 18 or more, 19 or more, 20 or more, 21 or more, 22 or more, 23 or more, 24 or more, 25 or more, 26 or more, 27 or more, 28 or more, 29 or more, 30 or more, 31 or more, 32 or more, 33 or more, 34 or more, 35 or more, 36 or more, 37 or more, 38 or more, 39 or more, 40 or more, 41 or more, 42 or more, 43 or more, 44 or more, 45 or more, 46 or more, 47 or more, 48 or more, 49 or more, or 50 or more mutations compared to any one of the nucleic acid sequences set forth in SEQ ID NO: 373, SEQ ID NO: 374, SEQ ID NO: 375, SEQ ID NO: 376, SEQ ID NO: 377, SEQ ID NO: 378, or SEQ ID NO: 379. In some embodiments, the RNA/DNA chimera molecule includes a nucleic acid sequence that has at least 10, at least 15, at least 20, at least 30, at least 40, at least 50, at least 60, at least 70, at least 80, at least 90, at least 100, at least 150, at least 200, at least 250, at least 300, at least 350, at least 400, at least 500, at least 600, at least 700, at least 800, at least 900, at least 1000, at least 1100, or at least 1200 identical contiguous nucleic acid residues as compared to any one of the nucleic acid sequences set forth in SEQ ID NO: 373, SEQ ID NO: 374, SEQ ID NO: 375, SEQ ID NO: 376, SEQ ID NO: 377, SEQ ID NO: 378, or SEQ ID NO: 379.

[0180] Additional nucleic acid based inhibitors of UDG will be apparent to those of skill in the art based on this disclosure and knowledge in the field, and are within the scope of this disclosure. Details of nucleic acid based inhibitors may be found in Roldan-Arjone et al., Front Plant Sci. (2019) 10: 1055. PMID: 31543887; and Dalakouras et al., Front Plant Sci. (2016) 7:1327. PMID: 27625678.

TABLE 1
Exemplary Uracil-DNA Glycosylase (UDG) Targets in Plants

| Species | RefSeq No.: | Amino Acid Sequence |
|---|---|---|
| Sorghum bicolor | XP_021318175.1 | MAPSPPTPAAPKTIADFFARPAKRLRAGSAAPAASLSSSPSSLSPE |
| | | QRRRADTNLALARARRNLRLAESKAQASGGAPKLEELLVEETW |
| | | AEALHGELRKPYALELCRFVAHERLHGPLPVYPPPHLVFHALNA |
| | | TPFDRVKAVIIGQDPYHGPGQAMGLSFSVPEGIKIPSSLGNIFKEL |
| | | EKDLGCTVPSHGNLERWAVQGVLMLNTVLTVREHQANSHAKK |
| | | GWEQFTDAVIKTVSQKKSGLVFLLWGNSAQSKTRLIDETKHHIL |
| | | KSAHPSGLSANRGFFGCRHFSKTNQILEKLGLSAIDWQL (SEQ ID |
| | | NO: 373) |
| Zea mays | NP_001150773.2 | MPPSPPTPAAPKTIADFFARPAKRLRAAPAASLSSNSSPSSLSPEQ |
| | | RRRADTNLALARARRNLRLAESKAQASGGAPKLEELLVEETWA |
| | | EALRGELRKSYALELCRFVAHERLHGPLPVYPPPHLVFHALNAT |
| | | PFDRVKAVIIGQDPYHGPGQAMGLSFSVPEGIKIPSSLGNIFKELK |
| | | KDLGCTVPSHGNLERWAVQGVLMLNTVLTVREHQANSHAKKG |
| | | WEQFTDEVIKTISQKKSGLVFLLWGNSAQSKTRLIDETKHHILKS |
| | | AHPSGLSANRGFFGCRHFSKTNEILEKLGLSAIDWQL (SEQ ID |
| | | NO: 374) |
| Solanum | XP_010315595.1 | MASSSSKTLKDLWKQPAAKRLKQVSSTENFISSALASSSSRKDC |
| lycopersicum | | DEDPKDVVSSTPEQNSRMEFNRSLAKSKRNLKLCSDKISKLNAN |
| | | GEGGGYVKLQELLIEETWLEALPGEFEKTYAGNLCKFVEKEISG |
| | | GVPIYPPLHLIFNALNTTAFDRIKAVIIGQDPYHGPGQAMGLSFS |
| | | VPKGVKVPSSLLNIYKELKQDLGCSIPLHGNLEQWAVQGVLLLN |
| | | AVLTVRHHQANSHANKGWEQFTDAIIKTISKKKEGVVFILWGN |
| | | YAQAKARLVDETKHHILKSAHPSGLSANRGFFGCRAWFPLTSQ |
| | | VLCSPTCQRNKWKQL (SEQ ID NO: 375) |
| Oryza saliva | XP_015634353.1 | MAPPLPPTAPKTIADYLIRPSKRLRPTSPAPAAAASAPLSSSSLSPE |
| (Japonica Group) | | QRRRADTNLALARARRHLRLAESKASGGTAKLEELLVEETWLE |
| | | ALPGELHKPYALELCRFVAHERLHSPVPVYPPPHLVFHALHATP |
| | | FDRVKAVIIGQDPYHGPGQAMGLSFSVPEGIKIPSSLANIFKELQK |
| | | DLGCTVPSHGNLERWAVQGVLMLNTVLTVREHQANSHAKKG |
| | | WEQFTDAVIKTISLKKSGIVFILWGNSAQAKTRLIDETKHHILKS |
| | | AHPSGLSASRGFFGCRHFSKTNQILERLGLSAIDWQL (SEQ ID |
| | | NO: 376) |
| Glycine max | XP_014619936.1 | MASAPSRTLTDFFQPASKRLKPTLPASCKSDDANASTLSVDQKL |
| | | RMEYNKLLAKSKRNLKLCVERVSKSKVQNAESGLGGVKLEELL |
| | | VEETWLEALPGELQKPYALTLSKFVESEISGGDGVIFPPTHLIFNA |
| | | LNSTPFHTVKAVILGQDPYHGPGQAMGLSFSVPEGIKVPSSLVNI |
| | | FKELHQDLGCSIPTHGNLQKWAVQGVLLLNAVLTVRKHQANSH |
| | | AKKGWEQFTDVVIKTISQKKEGVVFLLWGNSAREKSRLIDARK |
| | | HHVLTAAHPSGLSANRGFFGCRHFSRTNQLLEQMGIDPIDWQL |
| | | (SEQ ID NO: 377) |
| Glycine max | XP_006590826.2 | MGWKTFSNPLSDEANSSTLSLEQKSRVEYNKLLAKSKRNLKLCI |
| | | ERVSKSKESDSAGVKLEELLVEETWLDALPDELQKPYALTLSKF |
| | | VGSEISCGGDDVVFPPTHLIFNALNSTPFHTVKAVILGQVFGCLR |
| | | VQRDGNFDCIWVHFIAILRYNIRHVPDLCVGICLFTKIAARGMWI |
| | | IKCHFVYISLPAGLSIRKHQAYSHVKKGWEQFTDAVIKTISQKEG |
| | | VVFLLWGNSAPEKSRLIDATKHHVLTAAHPSGLSANRGFFGCRH |
| | | FSCTILEQMGIDPIDSQL(SEQ ID NO: 378) |
| Triticum | SPT20817.1 | MAPSPPTAPKTIADFFVRPAKRLRSGATTTTVVVPAASLSPSSGP |
| aestivum | | SDPTSLSPEQRRRADTNLALARARRNLRLAESKAAGGGAKLEEL |
| | | LVEETWLEALSGELRKPYALDLCRFVAHERLHAKVPVYPPPHL |
| | | VFHALHTTPFHSVKAVIIGQDPYHGPGQAMGLSFSVPEGIKIPSSL |
| | | QNIFKELHKDLGCTIPSHGNLERWAVQGILMLNTVLTVREHQAN |
| | | SHAKKGWEQFTDAVIKTVSQKKSGLVFILWGNSAQAKIRLIDET |
| | | KHHILKSAHPSGLSANRGFFGCRHFSQTNQILERLGLSTIDWQL |
| | | (SEQ ID NO: 379) |

### Deoxyuracil-Modified Guide RNA Inhibitors of Uracil-DNA Glycosylase

[0181] Several Cas family nucleases can accommodate 5′ or 3′ extensions to the spacer sequence, which may be engineered to contain additional natural or non-natural bases that lend novel functions to the base-editing system. As shown in FIG. 1, an extension including one or more deoxy-uracil (dU) residues can provide secondary substrates for uracil-DNA glycosylase, thereby reducing the likelihood that an exposed edited base will be bound and excised before being encoded by mismatch repair or replication machinery. The dU-extension can be further modified to resist glycosidic bond cleavage, enhance stability in vivo, or contain dU derivatives with enhanced ability to bind uracil-DNA glycosylase, all of which would produce more potent and longer-lived competitive inhibition of uracil-DNA glycosylase activity. Further, the uracil-containing extension may also be double-stranded (e.g., DNA) and contain one or more U:T, U:G, U:C, U:A, dU: T, dU: G, dU:C, or dU:A pairs. Useful dU analogs can include DNA lesions or repair pathway intermediates. For example, dU analogs are commercially available (from Sigma) in chemically synthesized oligos: 5-F-dU, 5-Br-dU, 5-I-dU, 2′-deoxypseudouridine, and 5,6-dihydro-dU. 2′-deoxypseudouridine is a non-cleavable substrate (Parikh et al., PNAS (2000) 97(10):5083-5088. doi:10.1073/pnas.97.10.5083).

[0182] Extension of the crRNA with dU bases can be accomplished during chemical synthesis or enzymatically using polymerases (Kent et al., eLife (2016) 5:e13740. PMID:27311885). The inhibitor-containing DNA oligonucleotides can be synthesized (e.g., by IDT or Sigma) by standard phosphoramidate chemistry, just like a PCR primer. Alternatively, poly-dU oligonucleotides of precise length and composition can be attached directly to a chemically-modified crRNA using one of a number of different attachment reagents. For example, using a “click” reaction (Lee et al., eLife (2017) 6:e25312. PMID: 28462777). Further, T4 RNA ligase 1 can be used to ligate a DNA oligonucleotide to single stranded RNA. Additional details regarding RNA guides including poly dU extensions may be found in Ahn et al., Sci Rep (2019) 9(1): 13911. PMID: 31227798; Bin Moon et al., Nat Commun (2018) 9(1):3651. PMID: 30194297.

[0183] The dU portion linked to a guide RNA can include nucleic acid analogs (e.g., analogs having other than a phosphodiester backbone). Nucleic acids can be purified from natural sources, produced using recombinant expression systems and optionally purified, chemically synthesized, etc. Where appropriate, e.g., in the case of chemically synthesized molecules, nucleic acids can include nucleoside analogs such as analogs having chemically modified bases or sugars, and backbone modifications. In some embodiments, a nucleic acid is or includes natural nucleosides (e.g. adenosine, thymidine, guanosine, cytidine, uridine, deoxyadenosine, deoxythymidine, deoxyguanosine, and deoxycytidine); nucleoside analogs (e.g., 2-aminoadenosine, 2-thiothymidine, inosine, pyrrolo-pyrimidine, 3-methyl adenosine, 5-methylcytidine, 2-aminoadenosine, C5-bromouridine, C5-fluorouridine, C5-iodouridine, C5-propynyl-uridine, C5-propynyl-cytidine, C5-methylcytidine, 2-aminoadenosine, 7-deazaadenosine, 7-deazaguanosine, 8-oxoadenosine, 8-oxoguanosine, O(6)-methylguanine, and 2-thiocytidine); chemically modified bases; biologically modified bases (e.g., methylated bases); intercalated bases; modified sugars (e.g., 2′-fluororibose, ribose, 2′-deoxyribose, arabinose, and hexose); and/or modified phosphate groups (e.g., phosphorothioates and 5′-N-phosphoramidite linkages).

[0184] In some embodiments, the present disclosure relates to RNA guides of Cas nucleases with poly dU (deoxy-Uracil) or dU-containing extensions. In some embodiments, the present disclosure relates to RNA guides of Cas nucleases with one or more dU (deoxy-Uracil) residues added to the tail of the RNA guides.

[0185] In some embodiments, the npUGI (e.g., an organochemical inhibitor of uracil glycosylase, a nucleic acid based inhibitor of uracil-DNA glycosylase, or a RNA guide of a dCas9 nuclease with a poly dU (deoxy-Uracil) extension) is linked to the base-editing system having the DNA binding domain (e.g., a Cas9 domain, a Cas12a domain, a Cas12h domain, a Cas12i domain, a CasX domain, a CasY domain, a C2c1 domain, a C2c2 domain, a C2c3 domain, a TALE domain, or a ZF domain) and the deaminase domain (e.g., an APOBEC1 deaminase domain, an APOBEC2 deaminase domain, an APOBEC3 deaminase domain, an APOBEC4 deaminase domain, an APOBEC3A deaminase domain, an APOBEC3B deaminase domain, an APOBEC3C deaminase domain, an APOBEC3D deaminase domain, an APOBEC3E deaminase domain, an APOBEC3F deaminase domain, an APOBEC3G deaminase domain, or an APOBEC3H deaminase domain). In some embodiments, the npUGI (e.g., e.g., an organochemical inhibitor of uracil glycosylase, a nucleic acid based inhibitor of uracil-DNA glycosylase, or a RNA guide of a dCas9 nuclease with a poly dU (deoxy-Uracil) extension) is not linked to the base-editing system having the DNA binding domain (e.g., a Cas9 domain, a Cas12a domain, a Cas12h domain, a Cas12i domain, a CasX domain, a CasY domain, a C2c1 domain, a C2c2 domain, a C2c3 domain, a TALE domain, or a ZF domain) and the deaminase domain (e.g., an APOBEC1 deaminase domain, an APOBEC2 deaminase domain, an APOBEC3 deaminase domain, an APOBEC4 deaminase domain, an APOBEC3A deaminase domain, an APOBEC3B deaminase domain, an APOBEC3C deaminase domain, an APOBEC3D deaminase domain, an APOBEC3E deaminase domain, an APOBEC3F deaminase domain, an APOBEC3G deaminase domain, or an APOBEC3H deaminase domain). In some embodiments, the base-editing system provided herein is generated in vitro by complexing. In some embodiments, the base-editing system provided herein is delivered by PEG-mediated transfection. In some embodiments, the base-editing system provided herein is generated in vitro by complexing a purified CRISPR-deaminase with the RNA-DNA hybrid guide RNA and is subsequently delivered by PEG-mediated transfection. In some embodiments, the base-editing system provided herein is vector-encoded. In some embodiments, the base-editing system provided herein is vector-encoded and co-delivered with exogenous nucleic acid via PEG-mediated transfection. In some embodiments, the base-editing system provided herein is delivered by PEG-mediated transfection while the small molecule inhibitor is delivered via cell culture media supplementation.

### Using Base-Editing Systems to Treat Diseases or Disorders

[0186] Significantly, 80-90% of protein mutations responsible for human disease arise from the substitution, deletion, or insertion of only a single nucleotide (Pan et al., Mol Biotechnol (2013) 55(1):54-62. PMID: 23089945). In some aspects, the present disclosure relates to using any of the base editors provided herein to treat a disease or disorder. For example, any of the base editors provided herein may be used to correct one or more mutations associated with any of the diseases or disorders provided herein. In some embodiments, the target DNA sequence includes a sequence associated with a disease or disorder. In some embodiments, the target DNA sequence includes a point mutation associated with a disease or disorder. In some embodiments, the activity of the DNA binding domain (e.g., a Cas9 domain, a Cas12a domain, a Cas12h domain, a Cas12i domain, a CasX domain, a CasY domain, a C2c1 domain, a C2c2 domain, a C2c3 domain, a TALE domain, or a ZF domain), the DNA binding base-editing system, or the complex results in a correction of the point mutation. In some embodiments, the target DNA sequence includes a T to C point mutation associated with a disease or disorder, wherein the deamination of the mutant C base results in a sequence that is not associated with a disease or disorder. In some embodiments, the target DNA sequence encodes a protein, the point mutation is in a codon, and the point mutation results in a change in the amino acid encoded by the mutant codon as compared to the wild-type codon. In some embodiments, the deamination of the mutant C results in a change of the amino acid encoded by the mutant codon. In some embodiments, the deamination of the mutant C results in the codon encoding the wild-type amino acid. In some embodiments, the base editor is used in vivo in a subject, e.g., a human subject. In some embodiments, the subject has a disease or disorder or has been diagnosed with a disease or disorder. In some embodiments, the disease or disorder is cystic fibrosis, phenylketonuria, epidermolytic hyperkeratosis (EHK), Charcot-Marie-Toot disease type 4J, neuroblastoma (B), von Willebrand disease (vWD), myotonia congenital, hereditary renal amyloidosis, dilated cardiomyopathy (DCM), hereditary lymphedema, familial Alzheimer's disease, HIV, Prion disease, chronic infantile neurologic cutaneous articular syndrome (CINCA), desmin-related myopathy (DRM), a neoplastic disease associated with a mutant PI3KCA protein, a mutant CTNNB 1 protein, a mutant HRAS protein, or a mutant p53 protein.

[0187] Some embodiments provide methods for using the base-editing system provided herein. In some embodiments, the base-editing system is used to introduce a point mutation into a nucleic acid by deaminating a target nucleobase, e.g., a C residue. In some embodiments, the deamination of the target nucleobase results in the correction of a genetic defect, e.g., in the correction of a point mutation that leads to a loss of function in a gene product. In some embodiments, the genetic defect is associated with a disease or disorder, e.g., a lysosomal storage disorder or a metabolic disease, such as, for example, type I diabetes. In some embodiments, the methods provided herein are used to introduce a deactivating point mutation into a gene or allele that encodes a gene product that is associated with a disease or disorder. For example, in some embodiments, methods are provided herein that employ base-editing system to introduce a deactivating point mutation into an oncogene (e.g., in the treatment of a proliferative disease). A deactivating mutation may, in some embodiments, generate a premature stop codon in a coding sequence, which results in the expression of a truncated gene product, e.g., a truncated protein lacking the function of the full-length protein.

[0188] In some embodiments, the purpose of the methods provide herein is to restore the function of a dysfunctional gene via genome editing. The base-editing systems provided herein can be validated for gene editing-based human therapeutics in vitro, e.g., by correcting a disease-associated mutation in human cell culture. It will be understood by the skilled artisan that the base-editing systems provided herein, e.g., the base-editing systems including DNA binding domain (e.g., a Cas9 domain, a Cas12a domain, a Cas12h domain, a Cas12i domain, a CasX domain, a CasY domain, a C2c1 domain, a C2c2 domain, a C2c3 domain, an Argonaute domain, a TALE domain, or a ZF domain) and a nucleic acid deaminase domain can be used to correct any single pointT->C or A->G mutation. In the first case, deamination of the mutant C back to U corrects the mutation, and in the latter case, deamination of the C that is base-paired with the mutant G, followed by a round of replication, corrects the mutation.

[0189] An exemplary disease-relevant mutation that can be corrected by the provided base-editing systems in vitro or in vivo is the H1047R (A3140G) polymorphism in the PI3KCA protein. The phosphoinositide-3-kinase, catalytic alpha subunit (PI3KCA) protein acts to phosphorylate the 3-OH group of the inositol ring of phosphatidylinositol. The PI3KCA gene has been found to be mutated in many different carcinomas, and thus it is considered to be a potent oncogene. In fact, the A3 140G mutation is present in several NCI-60 cancer cell lines, such as, for example, the HCT116, SKOV3, and T47D cell lines, which are readily available from the American Type Culture Collection (ATCC).

[0190] In some embodiments, a cell carrying a mutation to be corrected, e.g., a cell carrying a point mutation, e.g., an A3 140G point mutation in exon 20 of the PI3KCA gene, resulting in a H1047R substitution in the PI3KCA protein, is contacted with an expression construct encoding a DNA binding domain (e.g., a Cas9 domain, a Cas12a domain, a Cas12h domain, a Cas12i domain, a CasX domain, a CasY domain, a C2c1 domain, a C2c2 domain, a C2c3 domain, an Argonaute domain, a TALE domain, or a ZF domain) deaminase base-editing system and an appropriately designed sgRNA targeting the base-editing system to the respective mutation site in the encoding PI3KCA gene. Control experiments can be performed where the sgRNAs are designed to target the base-editing systems to non-C residues that are within the PI3KCA gene. Genomic DNA of the treated cells can be extracted, and the relevant sequence of the PI3KCA genes PCR amplified and sequenced to assess the activities of the base-editing systems in human cell culture.

[0191] It will be understood that the example of correcting point mutations in PI3KCA is provided for illustration purposes and is not meant to limit the instant disclosure. The skilled artisan will understand that the instantly disclosed base-editing systems can be used to correct other point mutations and mutations associated with other cancers and with diseases other than cancer including other proliferative diseases.

[0192] The successful correction of point mutations in disease-associated genes and alleles opens up new strategies for gene correction with applications in therapeutics and basic research. Site-specific single-base modification systems like the disclosed base-editing systems of DNA binding (e.g., a Cas9 domain, a Cas12a domain, a Cas12h domain, a Cas12i domain, a CasX domain, a CasY domain, a C2c1 domain, a C2c2 domain, a C2c3 domain, an Argonaute domain, a TALE domain, or a ZF domain) and deaminase enzymes or domains also have applications in “reverse” gene therapy, where certain gene functions are purposely suppressed or abolished. In these cases, site-specifically mutating Tip (TGG), Gin (CAA and CAG), or Arg (CGA) residues to premature stop codons (TAA, TAG, TGA) can be used to abolish protein function in vitro, ex vivo, or in vivo.

[0193] The instant disclosure provides methods for the treatment of a subject diagnosed with a disease associated with or caused by a point mutation that can be corrected by a base-editing system provided herein. For example, in some embodiments, a method is provided that includes administering to a subject having such a disease, e.g., a cancer associated with a PI3KCA point mutation as described above, an effective amount of a DNA binding (e.g., a Cas9 domain, a Cas12a domain, a Cas12h domain, a Cas12i domain, a CasX domain, a CasY domain, a C2c1 domain, a C2c2 domain, a C2c3 domain, a TALE domain, or a ZF domain) deaminase base-editing system that corrects the point mutation or introduces a deactivating mutation into the disease-associated gene. In some embodiments, the disease is a proliferative disease. In some embodiments, the disease is a genetic disease. In some embodiments, the disease is a neoplastic disease. In some embodiments, the disease is a metabolic disease. In some embodiments, the disease is a lysosomal storage disease. Other diseases that can be treated by correcting a point mutation or introducing a deactivating mutation into a disease-associated gene will be known to those of skill in the art, and the disclosure is not limited in this respect.

[0194] The instant disclosure provides methods for the treatment of additional diseases or disorders, e.g., diseases or disorders that are associated or caused by a point mutation that can be corrected by deaminase-mediated gene editing. Some such diseases are described herein, and additional suitable diseases that can be treated with the strategies and base-editing systems provided herein will be apparent to those of skill in the art based on the instant disclosure. Exemplary suitable diseases and disorders are listed below. It will be understood that the numbering of the specific positions or residues in the respective sequences depends on the particular protein and numbering scheme used. Numbering might be different, e.g., in precursors of a mature protein and the mature protein itself, and differences in sequences from species to species may affect numbering. One of skill in the art will be able to identify the respective residue in any homologous protein and in the respective encoding nucleic acid by methods well known in the art, e.g., by sequence alignment and determination of homologous residues. Exemplary suitable diseases and disorders include, without limitation, cystic fibrosis (see, e.g., Schwank et al., Cell stem cell (2013) 13: 653-658; and Wu et al., Cell stem cell (2013) 13: 659-662); phenylketonuria, e.g., a phenylalanine to serine mutation at residue 835 (mouse) or 240 (human) or a homologous residue in phenylalanine hydroxylase gene (T to C mutation) (see, e.g., McDonald et al., Genomics (1997) 39:402-405); Bernard-Soulier syndrome (BSS), e.g., a phenylalanine to serine mutation at residue 55 or a homologous residue, or a cysteine to arginine mutation at residue 24 or a homologous residue in the platelet membrane glycoprotein IX (T to C mutation) (see, e.g., Noris et al., British Journal of Haematology (1997) 97: 312-320; and Ali et al., Hematol (2014) 93: 381-384); epidermolytic hyperkeratosis (EHK), e.g., a leucine to proline mutation at residue 160 or 161 (if counting the initiator methionine) or a homologous residue in keratin 1 (T to C mutation) (see, e.g., Chipev et al., Cell (1992) 70: 821-828; see also accession number P04264 in the UNIPROT database); chronic obstructive pulmonary disease (COPD), e.g., a leucine to proline mutation at residue 54 or 55 (if counting the initiator methionine) or a homologous residue in the processed form of α₁-antitrypsin or residue 78 in the unprocessed form or a homologous residue (T to C mutation) (see, e.g., Poller et al., Genomics (1993) 17: 740-743; see also accession number P01011 in the UNIPROT database); Charcot-Marie-Toot disease type 4J, e.g., a isoleucine to threonine mutation at residue 41 or a homologous residue (T to C mutation) (see, e.g., Lenk et al., PLoS Genetics (2011) 7: e1002104); neuroblastoma (NB), e.g., a leucine to proline mutation at residue 197 or a homologous residue in Caspase-9 (T to C mutation) (see, e.g., Kundu et al., 3 Biotech (2013) 3:225-234); von Willebrand disease (vWD), e.g., a cysteine to arginine mutation at residue 509 or a homologous residue in the processed form of von Willebrand factor, or at residue 1272 or a homologous residue in the unprocessed form of von Willebrand factor (T to C mutation) (see, e.g., Lavergne et al., Br J Haematol (1992) 82: 66-72; see also accession number P04275 in the UNIPROT database); myotonia congenital, e.g., a cysteine to arginine mutation at residue 277 or a homologous residue in the muscle chloride channel gene CLCN1 (T to C mutation) (see, e.g., Weinberger et al., The J of Physiology (2012) 590: 3449-3464); hereditary renal amyloidosis, e.g., a stop codon to arginine mutation at residue 78 or a homologous residue in the processed form of apolipoprotein A11 or at residue 101 or a homologous residue in the unprocessed form (T to C mutation) (see, e.g., Yazaki et al., Kidney Int (2003) 64: 11-16); dilated cardiomyopathy (DCM), e.g., a tryptophan to arginine mutation at residue 148 or a homologous residue in the FOXD4 gene (T to C mutation) (see, e.g., Minoretti et al., Int J of Mol Med (2007) 19: 369-372); hereditary lymphedema, e.g., a histidine to arginine mutation at residue 1035 or a homologous residue in VEGFR3 tyrosine kinase (A to G mutation) (see, e.g., Irrthum et al., Am J Hum Genet (2000) 67: 295-301); familial Alzheimer's disease, e.g., an isoleucine to valine mutation at residue 143 or a homologous residue in presenilin1 (A to G mutation) (see, e.g., Gallo et al., J Alzheimer's disease (2011) 25: 425-431); Prion disease, e.g., a methionine to valine mutation at residues 129 or a homologous residue in prion protein (A to G mutation) (see, e.g., Lewis et al., J of General Virology (2006) 87: 2443-2449); chronic infantile neurologic cutaneous articular syndrome (CINCA), e.g., a tyrosine to cysteine mutation at residue 570 or a homologous residue in cryopyrin (A to G mutation) (see, e.g., Fujisawa et al., Blood (2007) 109: 2903-2911); and desmin-related myopathy (DRM), e.g., an arginine to glycine mutation at residue 120 or a homologous residue in up crystallin (A to G mutation) (see, e.g., Kumar et al., J Biol Chem (1999) 274: 24137-24141).

[0195] Exemplary diseases or disorders that may be treated include, without limitation, 3-Methylglutaconic aciduria type 2, 46,XY gonadal dysgenesis, 4-Alpha-hydroxyphenylpyruvate hydroxylase deficiency, 6- pyruvoyl-tetrahydropterin synthase deficiency, achromatopsia, Acid-labile subunit deficiency, Acrodysostosis, acroerythrokeratoderma, ACTH resistance, ACTH-independent macronodular adrenal hyperplasia, Activated PI3K-delta syndrome, Acute intermittent porphyria, Acute myeloid leukemia, Adams-Oliver syndrome 1/5/6, Adenylosuccinate lyase deficiency, Adrenoleukodystrophy, Adult neuronal ceroid lipofuscinosis, Adult onset ataxia with oculomotor apraxia, Advanced sleep phase syndrome, Age-related macular degeneration, Alagille syndrome, Alexander disease, Allan-Herndon-Dudley syndrome, Alport syndrome, X-linked recessive, Alternating hemiplegia of childhood, Alveolar capillary dysplasia with misalignment of pulmonary veins, Amelogenesis imperfecta, Amyloidogenic transthyretin amyloidosis, Amyotrophic lateral sclerosis, Anemia (nonspherocytic hemolytic, due to G6PD deficiency), Anemia (sideroblastic, pyridoxine-refractory, autosomal recessive), Anonychia, Antithrombin III deficiency, Aortic aneurysm, Aplastic anemia, Apolipoprotein C2 deficiency, Apparent mineralocorticoid excess, Aromatase deficiency, Arrhythmogenic right ventricular cardiomyopathy, Familial hypertrophic cardiomyopathy, Hypertrophic cardiomyopathy, Arthrogryposis multiplex congenital, Aspartylglycosaminuria, Asphyxiating thoracic dystrophy, Ataxia with vitamin E deficiency, Ataxia (spastic), Atrial fibrillation, Atrial septal defect, atypical hemolytic-uremic syndrome, autosomal dominant CD11C+/CD1C+ dendritic cell deficiency, Autosomal dominant progressive external ophthalmoplegia with mitochondrial DNA deletions, Baraitser-Winter syndrome, Bartter syndrome, Basa ganglia calcification, Beckwith-Wiedemann syndrome, Benign familial neonatal seizures, Benign scapuloperoneal muscular dystrophy, Bernard Soulier syndrome, Beta thalassemia intermedia, Beta-D-mannosidosis, Bietti crystalline corneoretinal dystrophy, Bile acid malabsorption, Biotinidase deficiency, Borjeson-Forssman-Lehmann syndrome, Boucher Neuhauser syndrome, Bowen-Conradi syndrome, Brachydactyly, Brown-Vialetto-Van laere syndrome, Brugada syndrome, Cardiac arrhythmia, Cardiofaciocutaneous syndrome, Cardiomyopathy, Carnevale syndrome, Carnitine palmitoyltransferase II deficiency, Carpenter syndrome, Cataract, Catecholaminergic polymorphic ventricular tachycardia, Central core disease, Centromeric instability of chromosomes 1,9 and 16 and immunodeficiency, Cerebral autosomal dominant arteriopathy, Cerebro-oculo-facio-skeletal syndrome, Ceroid lipofuscinosis, Charcot-Marie-Tooth disease, Cholestanol storage disease, Chondrocalcinosis, Chondrodysplasia, Chronic progressive multiple sclerosis, Coenzyme Q10 deficiency, Cohen syndrome, Combined deficiency of factor V and factor VIII, Combined immunodeficiency, Combined oxidative phosphorylation deficiency, Combined partial 17-alpha-hydroxylase/17,20- lyase deficiency, Complement factor d deficiency, Complete combined 17- alpha-hydroxylase/17,20-lyase deficiency, Cone-rod dystrophy, Congenital contractural arachnodactyly, Congenital disorder of glycosylation, Congenital lipomatous overgrowth, Neoplasm of ovary, PIK3CA Related Overgrowth Spectrum, Congenital long QT syndrome, Congenital muscular dystrophy, Congenital muscular hypertrophy-cerebral syndrome, Congenital myasthenic syndrome, Congenital myopathy with fiber type disproportion, Eichsfeld type congenital muscular dystrophy, Congenital stationary night blindness, Corneal dystrophy, Cornelia de Lange syndrome, Craniometaphyseal dysplasia, Crigler Najjar syndrome, Crouzon syndrome, Cutis laxa with osteodystrophy, Cyanosis, Cystic fibrosis, Cystinosis, Cytochrome-c oxidase deficiency, Mitochondrial complex I deficiency, D-2-hydroxyglutaric aciduria, Danon disease, Deafness with labyrinthine aplasia microtia and microdontia (LAMM), Deafness, Deficiency of acetyl-CoA acetyltransferase, Deficiency of ferroxidase, Deficiency of UDPglucose-hexose-1-phosphate uridylyltransferase, Dejerine-Sottas disease, Desbuquois syndrome, DFNA, Diabetes mellitus type 2, Diabetes-deafness syndrome, Diamond-Blackfan anemia, Diastrophic dysplasia, Dihydropteridine reductase deficiency, Dihydropyrimidinase deficiency, Dilated cardiomyopathy, Disseminated atypical mycobacterial infection, Distal arthrogryposis, Distal hereditary motor neuronopathy, Donnai Barrow syndrome, Duchenne muscular dystrophy, Becker muscular dystrophy, Dyschromatosis universalis hereditaria, Dyskeratosis congenital, Dystonia, Early infantile epileptic encephalopathy, Ehlers-Danlos syndrome, Eichsfeld type congenital muscular dystrophy, Emery-Dreifuss muscular dystrophy, Enamel-renal syndrome, Epidermolysis bullosa dystrophica inversa, Epidermolysis bullosa herpetiformis, Epilepsy, Episodic ataxia, Erythrokeratodermia variabilis, Erythropoietic protoporphyria, Exercise intolerance, Exudative vitreoretinopathy, Fabry disease, Factor V deficiency, Factor VII deficiency, Factor xiii deficiency, Familial adenomatous polyposis, breast cancer, ovarian cancer, cold urticarial, chronic infantile neurological, cutaneous and articular syndrome, hemiplegic migraine, hypercholesterolemia, hypertrophic cardiomyopathy, hypoalphalipoproteinemia, hypokalemia-hypomagnesemia, juvenile gout, hyperlipoproteinemia, visceral amyloidosis, hypophosphatemic vitamin D refractory rickets, FG syndrome, Fibrosis of extraocular muscles, Finnish congenital nephrotic syndrome, focal epilepsy, Focal segmental glomerulosclerosis, Frontonasal dysplasia, Frontotemporal dementia, Fructose-biphosphatase deficiency, Gamstorp-Wohlfart syndrome, Ganglioside sialidase deficiency, GATA-1-related thrombocytopenia, Gaucher disease, Giant axonal neuropathy, Glanzmann thrombasthenia, Glomerulocystic kidney disease, Glomerulopathy, Glucocorticoid resistance, Glucose-6-phosphate transport defect, Glutaric aciduria, Glycogen storage disease, Gorlin syndrome, Holoprosencephaly, GRACILE syndrome, Haemorrhagic telangiectasia, Hemochromatosis, Hemoglobin H disease, Hemolytic anemia, Hemophagocytic lymphohistiocytosis, Carcinoma of colon, Myhre syndrome, leukoencephalopathy, Hereditary factor IX deficiency disease, Hereditary factor VIII deficiency disease, Hereditary factor XI deficiency disease, Hereditary fructosuria, Hereditary Nonpolyposis Colorectal Neoplasm, Hereditary pancreatitis, Hereditary pyropoikilocytosis, Elliptocytosis, Heterotaxy, Heterotopia, Histiocytic medullary reticulosis, Histiocytosis-lymphadenopathy plus syndrome, HNSHA due to aldolase A deficiency, Holocarboxylase synthetase deficiency, Homocysteinemia, Howel-Evans syndrome, Hydatidiform mole, Hypercalciuric hypercalcemia, Hyperimmunoglobulin D, Mevalonic aciduria, Hyperinsulinemic hypoglycemia, Hyperkalemic Periodic Paralysis, Paramyotonia congenita of von Eulenburg, Hyperlipoproteinemia, Hypermanganesemia, Hypermethioninemia, Hyperphosphatasemia, Hypertension, hypomagnesemia, Hypobetalipoproteinemia, Hypocalcemia, Hypogonadotropic hypogonadism, Hypogonadotropic hypogonadism, Hypohidrotic ectodermal dysplasia, Hyper-IgM immunodeficiency, Hypohidrotic X-linked ectodermal dysplasia, Hypomagnesemia, Hypoparathyroidism, Idiopathic fibrosing alveolitis, Immunodeficiency, Immunoglobulin A deficiency, Infantile hypophosphatasia, Infantile Parkinsonism-dystonia, Insulin-dependent diabetes mellitus, Intermediate maple syrup urine disease, Ischiopatellar dysplasia, Islet cell hyperplasia, Isolated growth hormone deficiency, Isolated lutropin deficiency, Isovaleric acidemia, Joubert syndrome, Juvenile polyposis syndrome, Juvenile retinoschisis, Kallmann syndrome, Kartagener syndrome, Kugelberg-Welander disease, Lattice corneal dystrophy, Leber congenital amaurosis, Leber optic atrophy, Left ventricular noncompaction, Leigh disease, Mitochondrial complex I deficiency, Leprechaunism syndrome, Arthrogryposis, Anterior horn cell disease, Leukocyte adhesion deficiency, Leukodystrophy, Leukoencephalopathy, Ovarioleukodystrophy, L-ferritin deficiency, Li-Fraumeni syndrome, Limb-girdle muscular dystrophy-dystroglycanopathy, Loeys-Dietz syndrome, Long QT syndrome, Macrocephaly/autism syndrome, Macular corneal dystrophy, Macular dystrophy, Malignant hyperthermia susceptibility, Malignant tumor of prostate, Maple syrup urine disease, Marden Walker like syndrome, Marfan syndrome, Marie Unna hereditary hypotrichosis, Mast cell disease, Meconium ileus, Medium-chain acyl-coenzyme A dehydrogenase deficiency, Melnick-Fraser syndrome, Mental retardation, Merosin deficient congenital muscular dystrophy, Mesothelioma, Metachromatic leukodystrophy, Metaphyseal chondrodysplasia, Methemoglobinemia, methylmalonic aciduria, homocystinuria, Microcephaly, chorioretinopathy, lymphedema, Microphthalmia, Mild non-PKU hyperphenylalanemia, Mitchell-Riley syndrome, mitochondrial 3-hydroxy-3-methylglutaryl-CoA synthase deficiency, Mitochondrial complex I deficiency, Mitochondrial complex III deficiency, Mitochondrial myopathy, Mucolipidosis III, Mucopolysaccharidosis, Multiple sulfatase deficiency, Myasthenic syndrome, Mycobacterium tuberculosis, Myeloperoxidase deficiency, Myhre syndrome, Myoclonic epilepsy, Myofibrillar myopathy, Myoglobinuria, Myopathy, Myopia, Myotonia congenital, Navajo neurohepatopathy, Nemaline myopathy, Neoplasm of stomach, Nephrogenic diabetes insipidus, Nephronophthisis, Nephrotic syndrome, Neurofibromatosis, Neutral lipid storage disease, Niemann-Pick disease, Non-ketotic hyperglycinemia, Noonan syndrome, Noonan syndrome-like disorder, Norum disease, Macular degeneration, N-terminal acetyltransferase deficiency, Oculocutaneous albinism, Oculodentodigital dysplasia, Ohdo syndrome, Optic nerve aplasia, Ornithine carbamoyltransferase deficiency, Orofaciodigital syndrome, Osteogenesis imperfecta, Osteopetrosis, Ovarian dysgenesis, Pachyonychia, Palmoplantar keratoderma, nonepidermolytic, Papillon-Lefevre syndrome, Haim-Munk syndrome, Periodontitis, Peeling skin syndrome, Pendred syndrome, Peroxisomal fatty acyl-coa reductase 1 disorder, Peroxisome biogenesis disorder, Pfeiffer syndrome, Phenylketonuria, Phenylketonuria, Hyperphenylalaninemia, non-PKU, Pituitary hormone deficiency, Pityriasis rubra pilaris, Polyarteritis nodosa, Polycystic kidney disease, Polycystic lipomembranous osteodysplasia, Polymicrogyria, Pontocerebellar hypoplasia, Porokeratosis, Posterior column ataxia, Primary erythromelalgia, hyperoxaluria, Progressive familial intrahepatic cholestasis, Progressive pseudorheumatoid dysplasia, Propionic acidemia, Pseudohermaphroditism, Pseudohypoaldosteronism, Pseudoxanthoma elasticum-like disorder, Purine-nucleoside phosphorylase deficiency, Pyridoxal 5-phosphate-dependent epilepsy, Renal dysplasia, retinal pigmentary dystrophy, cerebellar ataxia, skeletal dysplasia, Reticular dysgenesis, Retinitis pigmentosa, Usher syndrome, Retinoblastoma, Retinopathy, RRM2B-related mitochondrial disease, Rubinstein-Taybi syndrome, Schnyder crystalline corneal dystrophy, Sebaceous tumor, Severe congenital neutropenia, Severe myoclonic epilepsy in infancy, Severe X-linked myotubular myopathy, onychodysplasia, facial dysmorphism, hypotrichosis, Short-rib thoracic dysplasia, Sialic acid storage disease, Sialidosis, Sideroblastic anemia, Small fiber neuropathy, Smith-Magenis syndrome, Sorsby fundus dystrophy, Spastic ataxia, Spastic paraplegia, Spermatogenic failure, Spherocytosis, Sphingomyelin/cholesterol lipidosis, Spinocerebellar ataxia, Split-hand/foot malformation, Spondyloepimetaphyseal dysplasia, Platyspondylic lethal skeletal dysplasia, Squamous cell carcinoma of the head and neck, Stargardt disease, Sucrase-isomaltase deficiency, Sudden infant death syndrome, Supravalvar aortic stenosis, Surfactant metabolism dysfunction, Tangier disease, Tatton-Brown-rahman syndrome, Thoracic aortic aneurysms and aortic dissections, Thrombophilia, Thyroid hormone resistance, TNF receptor-associated periodic fever syndrome (TRAPS), Tooth agenesis, Torsades de pointes, Transposition of great arteries, Treacher Collins syndrome, Tuberous sclerosis syndrome, Tyrosinase-negative oculocutaneous albinism, Tyrosinase-positive oculocutaneous albinism, Tyrosinemia, UDPglucose-4-epimerase deficiency, Ullrich congenital muscular dystrophy, Bethlem myopathy Usher syndrome, UV-sensitive syndrome, Van der Woude syndrome, popliteal pterygium syndrome, Very long chain acyl-CoA dehydrogenase deficiency, Vesicoureteral reflux, Vitreoretinochoroidopathy, Von Hippel-Lindau syndrome, von Willebrand disease, Waardenburg syndrome, Warsaw breakage syndrome, WFSl-Related Disorders, Wilson disease, Xeroderma pigmentosum, X-linked agammaglobulinemia, X-linked hereditary motor and sensory neuropathy, X-linked severe combined immunodeficiency, and Zellweger syndrome.

[0196] In some embodiments, the base-editing system of the present disclosure targets a clinically relevant pathogenic gene variant with a point mutation (e.g., a pathogenic single nucleotide polymorphism (SNP). In some embodiments, the point mutation is a T to C or an A to G substitution. In some embodiments, the point mutation is located in or near a sequence placing the point mutation within the deamination activity window (e.g., near a NGG PAM). In some embodiments, the clinically relevant pathogenic gene variant with a point mutation is selected from the group of SEQ ID NO: 747, SEQ ID NO: 748, SEQ ID NO: 749, SEQ ID NO: 750, SEQ ID NO: 751, SEQ ID NO: 752, SEQ ID NO: 753, SEQ ID NO: 754, SEQ ID NO: 755, SEQ ID NO: 756, SEQ ID NO: 757, SEQ ID NO: 758, SEQ ID NO: 759, SEQ ID NO: 760, SEQ ID NO: 761, SEQ ID NO: 762, SEQ ID NO: 763, SEQ ID NO: 764, SEQ ID NO: 765, SEQ ID NO: 766, SEQ ID NO: 767, SEQ ID NO: 768, SEQ ID NO: 769, SEQ ID NO: 770, SEQ ID NO: 771, SEQ ID NO: 772, SEQ ID NO: 773, SEQ ID NO: 774, SEQ ID NO: 775, SEQ ID NO: 776, SEQ ID NO: 777, SEQ ID NO: 778, SEQ ID NO: 779, SEQ ID NO: 780, SEQ ID NO: 781, SEQ ID NO: 782, SEQ ID NO: 783, SEQ ID NO: 784, SEQ ID NO: 785, SEQ ID NO: 786, SEQ ID NO: 787, SEQ ID NO: 788, SEQ ID NO: 789, SEQ ID NO: 790, SEQ ID NO: 791, SEQ ID NO: 792, SEQ ID NO: 793, SEQ ID NO: 794, SEQ ID NO: 795, SEQ ID NO: 796, SEQ ID NO: 797, SEQ ID NO: 798, SEQ ID NO: 799, SEQ ID NO: 800, SEQ ID NO: 801, SEQ ID NO: 802, SEQ ID NO: 803, SEQ ID NO: 804, SEQ ID NO: 805, SEQ ID NO: 806, SEQ ID NO: 807, SEQ ID NO: 808, SEQ ID NO: 809, SEQ ID NO: 810, SEQ ID NO: 811, SEQ ID NO: 812, SEQ ID NO: 813, SEQ ID NO: 814, SEQ ID NO: 815, SEQ ID NO: 816, SEQ ID NO: 817, SEQ ID NO: 818, SEQ ID NO: 819, SEQ ID NO: 820, SEQ ID NO: 821, SEQ ID NO: 822, SEQ ID NO: 823, SEQ ID NO: 824, SEQ ID NO: 825, SEQ ID NO: 826, SEQ ID NO: 827, SEQ ID NO: 828, SEQ ID NO: 829, SEQ ID NO: 830, SEQ ID NO: 831, SEQ ID NO: 832, SEQ ID NO: 833, SEQ ID NO: 834, SEQ ID NO: 835, SEQ ID NO: 836, SEQ ID NO: 837, SEQ ID NO: 838, SEQ ID NO: 839, SEQ ID NO: 840, SEQ ID NO: 841, SEQ ID NO: 842, SEQ ID NO: 843, SEQ ID NO: 844, SEQ ID NO: 845, SEQ ID NO: 846, SEQ ID NO: 847, SEQ ID NO: 848, SEQ ID NO: 849, SEQ ID NO: 850, SEQ ID NO: 851, SEQ ID NO: 852, SEQ ID NO: 853, SEQ ID NO: 854, SEQ ID NO: 855, SEQ ID NO: 856, SEQ ID NO: 857, SEQ ID NO: 858, SEQ ID NO: 859, SEQ ID NO: 860, SEQ ID NO: 861, SEQ ID NO: 862, SEQ ID NO: 863, SEQ ID NO: 864, SEQ ID NO: 865, SEQ ID NO: 866, SEQ ID NO: 867, SEQ ID NO: 868, SEQ ID NO: 869, SEQ ID NO: 870, SEQ ID NO: 871, SEQ ID NO: 872, SEQ ID NO: 873, SEQ ID NO: 874, SEQ ID NO: 875, SEQ ID NO: 876, SEQ ID NO: 877, SEQ ID NO: 878, SEQ ID NO: 879, SEQ ID NO: 880, SEQ ID NO: 881, SEQ ID NO: 882, SEQ ID NO: 883, SEQ ID NO: 884, SEQ ID NO: 885, SEQ ID NO: 886, SEQ ID NO: 887, SEQ ID NO: 888, SEQ ID NO: 889, SEQ ID NO: 890, SEQ ID NO: 891, SEQ ID NO: 892, SEQ ID NO: 893, SEQ ID NO: 894, SEQ ID NO: 895, SEQ ID NO: 896, SEQ ID NO: 897, SEQ ID NO: 898, SEQ ID NO: 899, SEQ ID NO: 900, SEQ ID NO: 901, SEQ ID NO: 902, SEQ ID NO: 903, SEQ ID NO: 904, SEQ ID NO: 905, SEQ ID NO: 906, SEQ ID NO: 907, SEQ ID NO: 908, SEQ ID NO: 909, SEQ ID NO: 910, SEQ ID NO: 911, SEQ ID NO: 912, SEQ ID NO: 913, SEQ ID NO: 914, SEQ ID NO: 915, SEQ ID NO: 916, SEQ ID NO: 917, SEQ ID NO: 918, SEQ ID NO: 919, SEQ ID NO: 920, SEQ ID NO: 921, SEQ ID NO: 922, SEQ ID NO: 923, SEQ ID NO: 924, SEQ ID NO: 925, SEQ ID NO: 926, SEQ ID NO: 927, SEQ ID NO: 928, SEQ ID NO: 929, SEQ ID NO: 930, SEQ ID NO: 931, SEQ ID NO: 932, SEQ ID NO: 933, SEQ ID NO: 934, SEQ ID NO: 935, SEQ ID NO: 936, SEQ ID NO: 937, SEQ ID NO: 938, SEQ ID NO: 939, SEQ ID NO: 940, SEQ ID NO: 941, SEQ ID NO: 942, SEQ ID NO: 943, SEQ ID NO: 944, SEQ ID NO: 945, SEQ ID NO: 946, SEQ ID NO: 947, SEQ ID NO: 948, SEQ ID NO: 949, SEQ ID NO: 950, SEQ ID NO: 951, SEQ ID NO: 952, SEQ ID NO: 953, SEQ ID NO: 954, SEQ ID NO: 955, SEQ ID NO: 956, SEQ ID NO: 957, SEQ ID NO: 958, SEQ ID NO: 959, SEQ ID NO: 960, SEQ ID NO: 961, SEQ ID NO: 962, SEQ ID NO: 963, SEQ ID NO: 964, SEQ ID NO: 965, SEQ ID NO: 966, SEQ ID NO: 967, SEQ ID NO: 968, SEQ ID NO: 969, SEQ ID NO: 970, SEQ ID NO: 971, SEQ ID NO: 972, SEQ ID NO: 973, SEQ ID NO: 974, SEQ ID NO: 975, SEQ ID NO: 976, SEQ ID NO: 977, SEQ ID NO: 978, SEQ ID NO: 979, SEQ ID NO: 980, SEQ ID NO: 981, SEQ ID NO: 982, SEQ ID NO: 983, SEQ ID NO: 984, SEQ ID NO: 985, SEQ ID NO: 986, SEQ ID NO: 987, SEQ ID NO: 988, SEQ ID NO: 989, SEQ ID NO: 990, SEQ ID NO: 991, SEQ ID NO: 992, SEQ ID NO: 993, SEQ ID NO: 994, SEQ ID NO: 995, SEQ ID NO: 996, SEQ ID NO: 997, SEQ ID NO: 998, SEQ ID NO: 999, SEQ ID NO: 1000, SEQ ID NO: 1001, SEQ ID NO: 1002, SEQ ID NO: 1003, SEQ ID NO: 1004, SEQ ID NO: 1005, SEQ ID NO: 1006, SEQ ID NO: 1007, SEQ ID NO: 1008, SEQ ID NO: 1009, SEQ ID NO: 1010, SEQ ID NO: 1011, SEQ ID NO: 1012, SEQ ID NO: 1013, SEQ ID NO: 1014, SEQ ID NO: 1015, SEQ ID NO: 1016, SEQ ID NO: 1017, SEQ ID NO: 1018, SEQ ID NO: 1019, SEQ ID NO: 1020, SEQ ID NO: 1021, SEQ ID NO: 1022, SEQ ID NO: 1023, SEQ ID NO: 1024, SEQ ID NO: 1025, SEQ ID NO: 1026, SEQ ID NO: 1027, SEQ ID NO: 1028, SEQ ID NO: 1029, SEQ ID NO: 1030, SEQ ID NO: 1031, SEQ ID NO: 1032, SEQ ID NO: 1033, SEQ ID NO: 1034, SEQ ID NO: 1035, SEQ ID NO: 1036, SEQ ID NO: 1037, SEQ ID NO: 1038, SEQ ID NO: 1039, SEQ ID NO: 1040, SEQ ID NO: 1041, SEQ ID NO: 1042, SEQ ID NO: 1043, SEQ ID NO: 1044, SEQ ID NO: 1045, SEQ ID NO: 1046, SEQ ID NO: 1047, SEQ ID NO: 1048, SEQ ID NO: 1049, SEQ ID NO: 1050, SEQ ID NO: 1051, SEQ ID NO: 1052, SEQ ID NO: 1053, SEQ ID NO: 1054, SEQ ID NO: 1055, SEQ ID NO: 1056, SEQ ID NO: 1057, SEQ ID NO: 1058, SEQ ID NO: 1059, SEQ ID NO: 1060, SEQ ID NO: 1061, SEQ ID NO: 1062, SEQ ID NO: 1063, SEQ ID NO: 1064, SEQ ID NO: 1065, SEQ ID NO: 1066, SEQ ID NO: 1067, SEQ ID NO: 1068, SEQ ID NO: 1069, SEQ ID NO: 1070, SEQ ID NO: 1071, SEQ ID NO: 1072, SEQ ID NO: 1073, SEQ ID NO: 1074, SEQ ID NO: 1075, SEQ ID NO: 1076, SEQ ID NO: 1077, SEQ ID NO: 1078, SEQ ID NO: 1079, SEQ ID NO: 1080, SEQ ID NO: 1081, SEQ ID NO: 1082, SEQ ID NO: 1083, SEQ ID NO: 1084, SEQ ID NO: 1085, SEQ ID NO: 1086, SEQ ID NO: 1087, SEQ ID NO: 1088, SEQ ID NO: 1089, SEQ ID NO: 1090, SEQ ID NO: 1091, SEQ ID NO: 1092, SEQ ID NO: 1093, SEQ ID NO: 1094, SEQ ID NO: 1095, SEQ ID NO: 1096, SEQ ID NO: 1097, SEQ ID NO: 1098, SEQ ID NO: 1099, SEQ ID NO: 1100, SEQ ID NO: 1101, SEQ ID NO: 1102, SEQ ID NO: 1103, SEQ ID NO: 1104, SEQ ID NO: 1105, SEQ ID NO: 1106, SEQ ID NO: 1107, SEQ ID NO: 1108, SEQ ID NO: 1109, SEQ ID NO: 1110, SEQ ID NO: 1111, SEQ ID NO: 1112, SEQ ID NO: 1113, SEQ ID NO: 1114, SEQ ID NO: 1115, SEQ ID NO: 1116, SEQ ID NO: 1117, SEQ ID NO: 1118, SEQ ID NO: 1119, SEQ ID NO: 1120, SEQ ID NO: 1121, SEQ ID NO: 1122, SEQ ID NO: 1123, SEQ ID NO: 1124, SEQ ID NO: 1125, SEQ ID NO: 1126, SEQ ID NO: 1127, SEQ ID NO: 1128, SEQ ID NO: 1129, SEQ ID NO: 1130, SEQ ID NO: 1131, SEQ ID NO: 1132, SEQ ID NO: 1133, SEQ ID NO: 1134, SEQ ID NO: 1135, SEQ ID NO: 1136, SEQ ID NO: 1137, SEQ ID NO: 1138, SEQ ID NO: 1139, SEQ ID NO: 1140, SEQ ID NO: 1141, SEQ ID NO: 1142, SEQ ID NO: 1143, SEQ ID NO: 1144, SEQ ID NO: 1145, SEQ ID NO: 1146, SEQ ID NO: 1147, SEQ ID NO: 1148, SEQ ID NO: 1149, SEQ ID NO: 1150, SEQ ID NO: 1151, SEQ ID NO: 1152, SEQ ID NO: 1153, SEQ ID NO: 1154, SEQ ID NO: 1155, SEQ ID NO: 1156, SEQ ID NO: 1157, SEQ ID NO: 1158, SEQ ID NO: 1159, SEQ ID NO: 1160, SEQ ID NO: 1161, SEQ ID NO: 1162, SEQ ID NO: 1163, SEQ ID NO: 1164, SEQ ID NO: 1165, SEQ ID NO: 1166, SEQ ID NO: 1167, SEQ ID NO: 1168, SEQ ID NO: 1169, SEQ ID NO: 1170, SEQ ID NO: 1171, SEQ ID NO: 1172, SEQ ID NO: 1173, SEQ ID NO: 1174, SEQ ID NO: 1175, SEQ ID NO: 1176, SEQ ID NO: 1177, SEQ ID NO: 1178, SEQ ID NO: 1179, SEQ ID NO: 1180, SEQ ID NO: 1181, SEQ ID NO: 1182, SEQ ID NO: 1183, SEQ ID NO: 1184, SEQ ID NO: 1185, SEQ ID NO: 1186, SEQ ID NO: 1187, SEQ ID NO: 1188, SEQ ID NO: 1189, SEQ ID NO: 1190, SEQ ID NO: 1191, SEQ ID NO: 1192, SEQ ID NO: 1193, SEQ ID NO: 1194, SEQ ID NO: 1195, SEQ ID NO: 1196, SEQ ID NO: 1197, SEQ ID NO: 1198, SEQ ID NO: 1199, SEQ ID NO: 1200, SEQ ID NO: 1201, SEQ ID NO: 1202, SEQ ID NO: 1203, SEQ ID NO: 1204, SEQ ID NO: 1205, SEQ ID NO: 1206, SEQ ID NO: 1207, SEQ ID NO: 1208, SEQ ID NO: 1209, SEQ ID NO: 1210, SEQ ID NO: 1211, SEQ ID NO: 1212, SEQ ID NO: 1213, SEQ ID NO: 1214, SEQ ID NO: 1215, SEQ ID NO: 1216, SEQ ID NO: 1217, SEQ ID NO: 1218, SEQ ID NO: 1219, SEQ ID NO: 1220, SEQ ID NO: 1221, SEQ ID NO: 1222, SEQ ID NO: 1223, SEQ ID NO: 1224, SEQ ID NO: 1225, SEQ ID NO: 1226, SEQ ID NO: 1227, SEQ ID NO: 1228, SEQ ID NO: 1229, SEQ ID NO: 1230, SEQ ID NO: 1231, SEQ ID NO: 1232, SEQ ID NO: 1233, SEQ ID NO: 1234, SEQ ID NO: 1235, SEQ ID NO: 1236, SEQ ID NO: 1237, SEQ ID NO: 1238, SEQ ID NO: 1239, SEQ ID NO: 1240, SEQ ID NO: 1241, SEQ ID NO: 1242, SEQ ID NO: 1243, SEQ ID NO: 1244, SEQ ID NO: 1245, SEQ ID NO: 1246, SEQ ID NO: 1247, SEQ ID NO: 1248, SEQ ID NO: 1249, SEQ ID NO: 1250, SEQ ID NO: 1251, SEQ ID NO: 1252, SEQ ID NO: 1253, SEQ ID NO: 1254, SEQ ID NO: 1255, SEQ ID NO: 1256, SEQ ID NO: 1257, SEQ ID NO: 1258, SEQ ID NO: 1259, SEQ ID NO: 1260, SEQ ID NO: 1261, SEQ ID NO: 1262, SEQ ID NO: 1263, SEQ ID NO: 1264, SEQ ID NO: 1265, SEQ ID NO: 1266, SEQ ID NO: 1267, SEQ ID NO: 1268, SEQ ID NO: 1269, SEQ ID NO: 1270, SEQ ID NO: 1271, SEQ ID NO: 1272, SEQ ID NO: 1273, SEQ ID NO: 1274, SEQ ID NO: 1275, SEQ ID NO: 1276, SEQ ID NO: 1277, SEQ ID NO: 1278, SEQ ID NO: 1279, SEQ ID NO: 1280, SEQ ID NO: 1281, SEQ ID NO: 1282, SEQ ID NO: 1283, SEQ ID NO: 1284, SEQ ID NO: 1285, SEQ ID NO: 1286, SEQ ID NO: 1287, SEQ ID NO: 1288, SEQ ID NO: 1289, SEQ ID NO: 1290, SEQ ID NO: 1291, SEQ ID NO: 1292, SEQ ID NO: 1293, SEQ ID NO: 1294, SEQ ID NO: 1295, SEQ ID NO: 1296, SEQ ID NO: 1297, SEQ ID NO: 1298, SEQ ID NO: 1299, SEQ ID NO: 1300, SEQ ID NO: 1301, SEQ ID NO: 1302, SEQ ID NO: 1303, SEQ ID NO: 1304, SEQ ID NO: 1305, SEQ ID NO: 1306, SEQ ID NO: 1307, SEQ ID NO: 1308, SEQ ID NO: 1309, SEQ ID NO: 1310, SEQ ID NO: 1311, SEQ ID NO: 1312, SEQ ID NO: 1313, SEQ ID NO: 1314, SEQ ID NO: 1315, SEQ ID NO: 1316, SEQ ID NO: 1317, SEQ ID NO: 1318, SEQ ID NO: 1319, SEQ ID NO: 1320, SEQ ID NO: 1321, SEQ ID NO: 1322, SEQ ID NO: 1323, SEQ ID NO: 1324, SEQ ID NO: 1325, SEQ ID NO: 1326, SEQ ID NO: 1327, SEQ ID NO: 1328, SEQ ID NO: 1329, SEQ ID NO: 1330, SEQ ID NO: 1331, SEQ ID NO: 1332, SEQ ID NO: 1333, SEQ ID NO: 1334, SEQ ID NO: 1335, SEQ ID NO: 1336, SEQ ID NO: 1337, SEQ ID NO: 1338, SEQ ID NO: 1339, SEQ ID NO: 1340, SEQ ID NO: 1341, SEQ ID NO: 1342, SEQ ID NO: 1343, SEQ ID NO: 1344, SEQ ID NO: 1345, SEQ ID NO: 1346, SEQ ID NO: 1347, SEQ ID NO: 1348, SEQ ID NO: 1349, SEQ ID NO: 1350, SEQ ID NO: 1351, SEQ ID NO: 1352, SEQ ID NO: 1353, SEQ ID NO: 1354, SEQ ID NO: 1355, SEQ ID NO: 1356, SEQ ID NO: 1357, SEQ ID NO: 1358, SEQ ID NO: 1359, SEQ ID NO: 1360, SEQ ID NO: 1361, SEQ ID NO: 1362, SEQ ID NO: 1363, SEQ ID NO: 1364, SEQ ID NO: 1365, SEQ ID NO: 1366, SEQ ID NO: 1367, SEQ ID NO: 1368, SEQ ID NO: 1369, SEQ ID NO: 1370, SEQ ID NO: 1371, SEQ ID NO: 1372, SEQ ID NO: 1373, SEQ ID NO: 1374, SEQ ID NO: 1375, SEQ ID NO: 1376, SEQ ID NO: 1377, SEQ ID NO: 1378, SEQ ID NO: 1379, SEQ ID NO: 1380, SEQ ID NO: 1381, SEQ ID NO: 1382, SEQ ID NO: 1383, SEQ ID NO: 1384, SEQ ID NO: 1385, SEQ ID NO: 1386, SEQ ID NO: 1387, SEQ ID NO: 1388, SEQ ID NO: 1389, SEQ ID NO: 1390, SEQ ID NO: 1391, SEQ ID NO: 1392, SEQ ID NO: 1393, SEQ ID NO: 1394, SEQ ID NO: 1395, SEQ ID NO: 1396, SEQ ID NO: 1397, SEQ ID NO: 1398, SEQ ID NO: 1399, SEQ ID NO: 1400, SEQ ID NO: 1401, SEQ ID NO: 1402, SEQ ID NO: 1403, SEQ ID NO: 1404, SEQ ID NO: 1405, SEQ ID NO: 1406, SEQ ID NO: 1407, SEQ ID NO: 1408, SEQ ID NO: 1409, SEQ ID NO: 1410, SEQ ID NO: 1411, SEQ ID NO: 1412, SEQ ID NO: 1413, SEQ ID NO: 1414, SEQ ID NO: 1415, SEQ ID NO: 1416, SEQ ID NO: 1417, SEQ ID NO: 1418, SEQ ID NO: 1419, SEQ ID NO: 1420, SEQ ID NO: 1421, SEQ ID NO: 1422, SEQ ID NO: 1423, SEQ ID NO: 1424, SEQ ID NO: 1425, SEQ ID NO: 1426, SEQ ID NO: 1427, SEQ ID NO: 1428, SEQ ID NO: 1429, SEQ ID NO: 1430, SEQ ID NO: 1431, SEQ ID NO: 1432, SEQ ID NO: 1433, SEQ ID NO: 1434, SEQ ID NO: 1435, SEQ ID NO: 1436, SEQ ID NO: 1437, SEQ ID NO: 1438, SEQ ID NO: 1439, SEQ ID NO: 1440, SEQ ID NO: 1441, SEQ ID NO: 1442, SEQ ID NO: 1443, SEQ ID NO: 1444, SEQ ID NO: 1445, SEQ ID NO: 1446, SEQ ID NO: 1447, SEQ ID NO: 1448, SEQ ID NO: 1449, SEQ ID NO: 1450, SEQ ID NO: 1451, SEQ ID NO: 1452, SEQ ID NO: 1453, SEQ ID NO: 1454, SEQ ID NO: 1455, SEQ ID NO: 1456, SEQ ID NO: 1457, SEQ ID NO: 1458, SEQ ID NO: 1459, SEQ ID NO: 1460, SEQ ID NO: 1461, SEQ ID NO: 1462, SEQ ID NO: 1463, SEQ ID NO: 1464, SEQ ID NO: 1465, SEQ ID NO: 1466, SEQ ID NO: 1467, SEQ ID NO: 1468, SEQ ID NO: 1469, SEQ ID NO: 1470, SEQ ID NO: 1471, SEQ ID NO: 1472, SEQ ID NO: 1473, SEQ ID NO: 1474, SEQ ID NO: 1475, SEQ ID NO: 1476, SEQ ID NO: 1477, SEQ ID NO: 1478, SEQ ID NO: 1479, SEQ ID NO: 1480, SEQ ID NO: 1481, SEQ ID NO: 1482, SEQ ID NO: 1483, SEQ ID NO: 1484, SEQ ID NO: 1485, SEQ ID NO: 1486, SEQ ID NO: 1487, SEQ ID NO: 1488, SEQ ID NO: 1489, SEQ ID NO: 1490, SEQ ID NO: 1491, SEQ ID NO: 1492, SEQ ID NO: 1493, SEQ ID NO: 1494, SEQ ID NO: 1495, SEQ ID NO: 1496, SEQ ID NO: 1497, SEQ ID NO: 1498, SEQ ID NO: 1499, SEQ ID NO: 1500, SEQ ID NO: 1501, SEQ ID NO: 1502, SEQ ID NO: 1503, SEQ ID NO: 1504, SEQ ID NO: 1505, SEQ ID NO: 1506, SEQ ID NO: 1507, SEQ ID NO: 1508, SEQ ID NO: 1509, SEQ ID NO: 1510, SEQ ID NO: 1511, SEQ ID NO: 1512, SEQ ID NO: 1513, SEQ ID NO: 1514, SEQ ID NO: 1515, SEQ ID NO: 1516, SEQ ID NO: 1517, SEQ ID NO: 1518, SEQ ID NO: 1519, SEQ ID NO: 1520, SEQ ID NO: 1521, SEQ ID NO: 1522, SEQ ID NO: 1523, SEQ ID NO: 1524, SEQ ID NO: 1525, SEQ ID NO: 1526, SEQ ID NO: 1527, SEQ ID NO: 1528, SEQ ID NO: 1529, SEQ ID NO: 1530, SEQ ID NO: 1531, SEQ ID NO: 1532, SEQ ID NO: 1533, SEQ ID NO: 1534, SEQ ID NO: 1535, SEQ ID NO: 1536, SEQ ID NO: 1537, SEQ ID NO: 1538, SEQ ID NO: 1539, SEQ ID NO: 1540, SEQ ID NO: 1541, SEQ ID NO: 1542, SEQ ID NO: 1543, SEQ ID NO: 1544, SEQ ID NO: 1545, SEQ ID NO: 1546, SEQ ID NO: 1547, SEQ ID NO: 1548, SEQ ID NO: 1549, SEQ ID NO: 1550, SEQ ID NO: 1551, SEQ ID NO: 1552, SEQ ID NO: 1553, SEQ ID NO: 1554, SEQ ID NO: 1555, SEQ ID NO: 1556, SEQ ID NO: 1557, SEQ ID NO: 1558, SEQ ID NO: 1559, SEQ ID NO: 1560, SEQ ID NO: 1561, SEQ ID NO: 1562, SEQ ID NO: 1563, SEQ ID NO: 1564, SEQ ID NO: 1565, SEQ ID NO: 1566, SEQ ID NO: 1567, SEQ ID NO: 1568, SEQ ID NO: 1569, SEQ ID NO: 1570, SEQ ID NO: 1571, SEQ ID NO: 1572, SEQ ID NO: 1573, SEQ ID NO: 1574, SEQ ID NO: 1575, SEQ ID NO: 1576, SEQ ID NO: 1577, SEQ ID NO: 1578, SEQ ID NO: 1579, SEQ ID NO: 1580, SEQ ID NO: 1581, SEQ ID NO: 1582, SEQ ID NO: 1583, SEQ ID NO: 1584, SEQ ID NO: 1585, SEQ ID NO: 1586, SEQ ID NO: 1587, SEQ ID NO: 1588, SEQ ID NO: 1589, SEQ ID NO: 1590, SEQ ID NO: 1591, SEQ ID NO: 1592, SEQ ID NO: 1593, SEQ ID NO: 1594, SEQ ID NO: 1595, SEQ ID NO: 1596, SEQ ID NO: 1597, SEQ ID NO: 1598, SEQ ID NO: 1599, SEQ ID NO: 1600, SEQ ID NO: 1601, SEQ ID NO: 1602, SEQ ID NO: 1603, SEQ ID NO: 1604, SEQ ID NO: 1605, SEQ ID NO: 1606, SEQ ID NO: 1607, SEQ ID NO: 1608, SEQ ID NO: 1609, SEQ ID NO: 1610, SEQ ID NO: 1611, SEQ ID NO: 1612, SEQ ID NO: 1613, SEQ ID NO: 1614, SEQ ID NO: 1615, SEQ ID NO: 1616, SEQ ID NO: 1617, SEQ ID NO: 1618, SEQ ID NO: 1619, SEQ ID NO: 1620, SEQ ID NO: 1621, SEQ ID NO: 1622, SEQ ID NO: 1623, SEQ ID NO: 1624, SEQ ID NO: 1625, SEQ ID NO: 1626, SEQ ID NO: 1627, SEQ ID NO: 1628, SEQ ID NO: 1629, SEQ ID NO: 1630, SEQ ID NO: 1631, SEQ ID NO: 1632, SEQ ID NO: 1633, SEQ ID NO: 1634, SEQ ID NO: 1635, SEQ ID NO: 1636, SEQ ID NO: 1637, SEQ ID NO: 1638, SEQ ID NO: 1639, SEQ ID NO: 1640, SEQ ID NO: 1641, SEQ ID NO: 1642, SEQ ID NO: 1643, SEQ ID NO: 1644, SEQ ID NO: 1645, SEQ ID NO: 1646, SEQ ID NO: 1647, SEQ ID NO: 1648, SEQ ID NO: 1649, SEQ ID NO: 1650, SEQ ID NO: 1651, SEQ ID NO: 1652, SEQ ID NO: 1653, SEQ ID NO: 1654, SEQ ID NO: 1655, SEQ ID NO: 1656, SEQ ID NO: 1657, SEQ ID NO: 1658, SEQ ID NO: 1659, SEQ ID NO: 1660, SEQ ID NO: 1661, SEQ ID NO: 1662, SEQ ID NO: 1663, SEQ ID NO: 1664, SEQ ID NO: 1665, SEQ ID NO: 1666, SEQ ID NO: 1667, SEQ ID NO: 1668, SEQ ID NO: 1669, SEQ ID NO: 1670, SEQ ID NO: 1671, SEQ ID NO: 1672, SEQ ID NO: 1673, SEQ ID NO: 1674, SEQ ID NO: 1675, SEQ ID NO: 1676, SEQ ID NO: 1677, SEQ ID NO: 1678, SEQ ID NO: 1679, SEQ ID NO: 1680, SEQ ID NO: 1681, SEQ ID NO: 1682, SEQ ID NO: 1683, SEQ ID NO: 1684, SEQ ID NO: 1685, SEQ ID NO: 1686, SEQ ID NO: 1687, SEQ ID NO: 1688, SEQ ID NO: 1689, SEQ ID NO: 1690, SEQ ID NO: 1691, SEQ ID NO: 1692, SEQ ID NO: 1693, SEQ ID NO: 1694, SEQ ID NO: 1695, SEQ ID NO: 1696, SEQ ID NO: 1697, SEQ ID NO: 1698, SEQ ID NO: 1699, SEQ ID NO: 1700, SEQ ID NO: 1701, SEQ ID NO: 1702, SEQ ID NO: 1703, SEQ ID NO: 1704, SEQ ID NO: 1705, SEQ ID NO: 1706, SEQ ID NO: 1707, SEQ ID NO: 1708, SEQ ID NO: 1709, SEQ ID NO: 1710, SEQ ID NO: 1711, SEQ ID NO: 1712, SEQ ID NO: 1713, SEQ ID NO: 1714, SEQ ID NO: 1715, SEQ ID NO: 1716, SEQ ID NO: 1717, SEQ ID NO: 1718, SEQ ID NO: 1719, SEQ ID NO: 1720, SEQ ID NO: 1721, SEQ ID NO: 1722, SEQ ID NO: 1723, SEQ ID NO: 1724, SEQ ID NO: 1725, SEQ ID NO: 1726, SEQ ID NO: 1727, SEQ ID NO: 1728, SEQ ID NO: 1729, SEQ ID NO: 1730, SEQ ID NO: 1731, SEQ ID NO: 1732, SEQ ID NO: 1733, SEQ ID NO: 1734, SEQ ID NO: 1735, SEQ ID NO: 1736, SEQ ID NO: 1737, SEQ ID NO: 1738, SEQ ID NO: 1739, SEQ ID NO: 1740, SEQ ID NO: 1741, SEQ ID NO: 1742, SEQ ID NO: 1743, SEQ ID NO: 1744, SEQ ID NO: 1745, SEQ ID NO: 1746, SEQ ID NO: 1747, SEQ ID NO: 1748, SEQ ID NO: 1749, SEQ ID NO: 1750, SEQ ID NO: 1751, SEQ ID NO: 1752, SEQ ID NO: 1753, SEQ ID NO: 1754, SEQ ID NO: 1755, SEQ ID NO: 1756, SEQ ID NO: 1757, SEQ ID NO: 1758, SEQ ID NO: 1759, SEQ ID NO: 1760, SEQ ID NO: 1761, SEQ ID NO: 1762, SEQ ID NO: 1763, SEQ ID NO: 1764, SEQ ID NO: 1765, SEQ ID NO: 1766, SEQ ID NO: 1767, SEQ ID NO: 1768, SEQ ID NO: 1769, SEQ ID NO: 1770, SEQ ID NO: 1771, SEQ ID NO: 1772, SEQ ID NO: 1773, SEQ ID NO: 1774, SEQ ID NO: 1775, SEQ ID NO: 1776, SEQ ID NO: 1777, SEQ ID NO: 1778, SEQ ID NO: 1779, SEQ ID NO: 1780, SEQ ID NO: 1781, SEQ ID NO: 1782, SEQ ID NO: 1783, SEQ ID NO: 1784, SEQ ID NO: 1785, SEQ ID NO: 1786, SEQ ID NO: 1787, SEQ ID NO: 1788, SEQ ID NO: 1789, SEQ ID NO: 1790, SEQ ID NO: 1791, SEQ ID NO: 1792, SEQ ID NO: 1793, SEQ ID NO: 1794, SEQ ID NO: 1795, SEQ ID NO: 1796, SEQ ID NO: 1797, SEQ ID NO: 1798, SEQ ID NO: 1799, SEQ ID NO: 1800, SEQ ID NO: 1801, SEQ ID NO: 1802, SEQ ID NO: 1803, SEQ ID NO: 1804, SEQ ID NO: 1805, SEQ ID NO: 1806, SEQ ID NO: 1807, SEQ ID NO: 1808, SEQ ID NO: 1809, SEQ ID NO: 1810, SEQ ID NO: 1811, SEQ ID NO: 1812, SEQ ID NO: 1813, SEQ ID NO: 1814, SEQ ID NO: 1815, SEQ ID NO: 1816, SEQ ID NO: 1817, SEQ ID NO: 1818, SEQ ID NO: 1819, SEQ ID NO: 1820, SEQ ID NO: 1821, SEQ ID NO: 1822, SEQ ID NO: 1823, SEQ ID NO: 1824, SEQ ID NO: 1825, SEQ ID NO: 1826, SEQ ID NO: 1827, SEQ ID NO: 1828, SEQ ID NO: 1829, SEQ ID NO: 1830, SEQ ID NO: 1831, SEQ ID NO: 1832, SEQ ID NO: 1833, SEQ ID NO: 1834, SEQ ID NO: 1835, SEQ ID NO: 1836, SEQ ID NO: 1837, SEQ ID NO: 1838, SEQ ID NO: 1839, SEQ ID NO: 1840, SEQ ID NO: 1841, SEQ ID NO: 1842, SEQ ID NO: 1843, SEQ ID NO: 1844, SEQ ID NO: 1845, SEQ ID NO: 1846, SEQ ID NO: 1847, SEQ ID NO: 1848, SEQ ID NO: 1849, SEQ ID NO: 1850, SEQ ID NO: 1851, SEQ ID NO: 1852, SEQ ID NO: 1853, SEQ ID NO: 1854, SEQ ID NO: 1855, SEQ ID NO: 1856, SEQ ID NO: 1857, SEQ ID NO: 1858, SEQ ID NO: 1859, SEQ ID NO: 1860, SEQ ID NO: 1861, SEQ ID NO: 1862, SEQ ID NO: 1863, SEQ ID NO: 1864, SEQ ID NO: 1865, SEQ ID NO: 1866, SEQ ID NO: 1867, or SEQ ID NO: 1868. In some embodiments, the point mutation can be edited by the base-editing system of the present disclosure to produce a gene variant that is no longer pathogenic (e.g., no longer associated with the disease or disorder, no longer clinically relevant, wild-type, etc.).

### Using Base-Editing Systems in Plants

[0197] In some aspects, the disclosure relates to using the base-editing systems of the present disclosure in plants. Exemplary applications of the base-editing systems and methods of the present disclosure in plants may be to correct deleterious mutations, produce derivatives, modify sequences, insert sequences, and edit genomes of plants. These applications may be in coding sequences of plant genes or in non-coding sequences (e.g., regulatory sequences).

[0198] The base-editing systems disclosed herein may be used to produce derivatives of coding sequences. These derivatives may result in increased levels of specific (e.g., preselected) amino acids in the encoded polypeptide. In some embodiments, these derivatives are of agriculturally important genes or the derivatives modify genes to increase their agricultural importance. For example, the gene encoding the barley high lysine polypeptide (BHL) is derived from barley chymotrypsin inhibitor (see, e.g., U.S. application Ser. No. 08/740,682 and WO 98/20133). Other exemplary target proteins include methionine-rich plant proteins such as from sunflower seed (Lilley et al., Proceedings of the World Congress on Vegetable Protein Utilization in Human Foods and Animal Feedstuffs, ed. Applewhite (American Oil Chemists Society, Champaign, Ill.) (1989) pp. 497-502), corn (Pedersen et al., J Biol Chem (1986) 261:6279; and Kirihara et al., Gene (1988) 71:359), and rice (Musumura et al., Plant Mol. Biol. (1989) 12:123). Other agronomically important genes include latex, Floury 2, growth factors, seed storage factors, and transcription factors.

[0199] The base-editing systems disclosed herein can be used to modify herbicide resistance traits. Exemplary herbicide resistance traits include genes coding for resistance to herbicides that act to inhibit the action of acetolactate synthase (ALS), in particular the sulfonylurea-type herbicides (e.g., the acetolactate synthase (ALS) gene containing mutations leading to such resistance, in particular the S4 and/or Hra mutations), genes coding for resistance to herbicides that act to inhibit action of glutamine synthase, such as phosphinothricin or basta (e.g., the bar gene); glyphosate (e.g., the EPSPS gene and the GAT gene; see, e.g., U.S. Pat. App. Pub. No. 20040082770 and WO 03/092360); or other such genes known in the art. The bar gene encodes resistance to the herbicide basta, the nptII gene encodes resistance to the antibiotics kanamycin and geneticin, and the ALS-gene mutants encode resistance to the herbicide chlorsulfuron. Additional herbicide resistance traits are for example described in U.S. Pat. App. Pub. No. 2016/0208243.

[0200] Sterility genes can also be modified using base-editing systems of the present disclosure. Modified sterility genes provide an alternative to physical sterility modifications, e.g., physical detasseling in corn. Examples of genes used in such ways include male tissue-preferred genes and genes with male sterility phenotypes such as QM, described in U.S. Pat. No. 5,583,210. Other sterility genes include kinases and those encoding compounds toxic to either male or female gametophytic development. Additional sterility traits are described for example in U.S. Pat. App. Pub. No. 2016/0208243.

[0201] Base-editing systems of the present disclosure can also be used to make haploid inducer lines as disclosed in WO2018086623.

[0202] Base-editing systems of the present disclosure can be used to alter agricultural product quality (e.g., to improve agricultural product quality, to alter agricultural product characteristics, etc.) or commercial traits (e.g., to improve commercial traits, to alter traits important for commercial production, etc.). For example, the quality of grain can be altered by modifying genes encoding traits such as levels and types of oils, saturated and unsaturated, quality and quantity of essential amino acids, and levels of cellulose. In corn, modified hordothionin proteins are described in U.S. Pat. Nos. 5,703,049, 5,885,801, 5,885,802, and 5,990,389. Commercial traits can also be altered using base-editing systems of the present disclosure by modifying a gene that could increase, for example, starch for ethanol production, or provide expression of proteins. An exemplary important commercial use of modified plants is the production of polymers and bioplastics such as described in U.S. Pat. No. 5,602,321. Genes such as β-Ketothiolase, PHBase (polyhydroxyburyrate synthase), and acetoacetyl-CoA reductase (see Schubert et al., J Bacteriol (1988) 170:5837-5847) facilitate expression of polyhyroxyalkanoates (PHAs).

[0203] In some embodiments, base-editing systems of the present disclosure can be used to alter exogenous products. Exogenous products include nucleic acids and proteins (e.g., enzymes or other protein-based products) that are not derived from the host organism species. Exogenous nucleic acids can be RNA, DNA, or RNA/DNA chimeras. Exogenous protein-based products can be from plants, prokaryotes, or other eukaryotes. Such protein products may include enzymes, cofactors, hormones, and the like. In some embodiments, the level of proteins, particularly modified proteins having improved amino acid distribution to improve the nutrient value of the plant, can be increased. In some embodiments, plants with improved nutrient value are achieved by the expression of such proteins having enhanced amino acid content.

[0204] The base-editing systems disclosed herein can also be used for insertion of heterologous genes and/or modification of native plant gene expression to achieve desirable plant traits. Such traits include, for example, disease resistance, herbicide tolerance, drought tolerance, salt tolerance, insect resistance, resistance against parasitic weeds, improved plant nutritional value, improved forage digestibility, increased grain yield, cytoplasmic male sterility, altered fruit ripening, increased storage life of plants or plant parts, reduced allergen production, and increased or decreased lignin content. Genes capable of conferring these desirable traits are disclosed in U.S. Pat. App. Pub. No. 2016/0208243.

[0205] The base-editing systems of the present disclosure may be used for base editing of any plant species, including, but not limited to, monocots and dicots (i.e., monocotyledonous and dicotyledonous, respectively). Examples of plant species of interest include, but are not limited to, corn (Zea mays), Brassica sp. (e.g., B. napus, B. rapa, B. juncea, particularly those Brassica species useful as sources of seed oil), alfalfa (Medicago sativa), rice (Oryza sativa), rye (Secale cereale), sorghum (Sorghum bicolor, Sorghum vulgare), oat (Avena sativa), barley (Hordeum vulgare), camelina (Camelina sativa), millet (e.g., pearl millet (Pennisetum glaucum), proso millet (Panicum miliaceum), foxtail millet (Setaria italica), finger millet (Eleusine coracana)), sunflower (Helianthus annuus), quinoa (Chenopodium quinoa), chicory (Cichorium intybus), lettuce (Lactuca sativa), safflower (Carthamus tinctorius), wheat (Triticum aestivum), soybean (Glycine max), tobacco (Nicotiana tabacum), potato (Solanum tuberosum), tomato (Solanum lycopersicum) peanuts (Arachis hypogaea), cotton (Gossypium barbadense, Gossypium hirsutum), sweet potato (Ipomoea batatus), cassava (Manihot esculenta), coffee (Coffea spp.), coconut (Cocos nucifera), pineapple (Ananas comosus), citrus trees (Citrus spp.), cocoa (Theobroma cacao), tea (Camellia sinensis), banana (Musa spp.), avocado (Persea americana), fig (Ficus casica), guava (Psidium guajava), mango (Mangifera indica), olive (Olea europaea), papaya (Carica papaya), cashew (Anacardium occidentale), macadamia (Macadamia integrifolia), almond (Prunus amygdalus), sugar beets (Beta vulgaris), sugarcane (Saccharum spp.), oil palm (Elaeis guineensis), poplar (Populus spp.), and eucalyptus (Eucalyptus spp.). Additional plant species of interest may be classified as vegetables, ornamentals, or conifers.

### Base-Editing System Capacities and Methods of Using Base-Editing Systems

[0206] Some aspects of the disclosure are based on the recognition that any of the base-editing systems provided herein are capable of modifying a specific nucleotide base without generating a significant proportion of indels. An “indel”, as used herein, refers to the insertion or deletion of a nucleotide base within a nucleic acid. Such insertions or deletions can lead to frame shift mutations within a coding region of a gene. In some embodiments, it is desirable to generate base-editing systems that efficiently modify (e.g., mutate or deaminate) a specific nucleotide within a nucleic acid, without generating a large number of insertions or deletions (i.e., indels) in the nucleic acid. In certain embodiments, any of the base-editing systems provided herein are capable of generating a greater proportion of intended modifications (e.g., point mutations or deaminations) versus indels. In some embodiments, the base-editing systems provided herein are capable of generating a ratio of intended point mutations to indels that is greater than 1:1. In some embodiments, the base-editing systems provided herein are capable of generating a ratio of intended point mutations to indels that is at least 1.5:1, at least 2:1, at least 2.5:1, at least 3:1, at least 3.5:1, at least 4:1, at least 4.5:1, at least 5:1, at least 5.5:1, at least 6:1, at least 6.5:1, at least 7:1, at least 7.5:1, at least 8:1, at least 8.5:1, at least 9:1, at least 9.5:1, at least 10:1, at least 11:1, at least 12:1, at least 13:1, at least 14:1, at least 15:1, at least 16:1, at least 17:1, at least 18:1, at least 19:1, at least 20:1, at least 25:1, at least 30:1, at least 35:1, at least 40:1, at least 45:1, at least 50:1, at least 60:1, at least 70:1, at least 80:1, at least 90:1, at least 100:1, at least 150:1, at least 200:1, at least 250:1, at least 300:1, at least 350:1, at least 400:1, at least 450:1, at least 500:1, at least 550:1, at least 600:1, at least 650:1, at least 700:1, at least 750:1, at least 800:1, at least 850:1, at least 900:1, at least 950:1, or at least 1000:1. The number of intended mutations and indels may be determined using any suitable method known in the art.

[0207] In some embodiments, the base-editing systems provided herein are capable of limiting formation of indels in a region of a nucleic acid. In some embodiments, the region is at a nucleotide targeted by a base-editing system or a region within 2, 3, 4, 5, 6, 7, 8, 9, or 10 nucleotides of a nucleotide targeted by a base-editing system. In some embodiments, any of the base-editing systems provided herein are capable of limiting the formation of indels at a region of a nucleic acid to less than 1%, less than 1.5%, less than 2%, less than 2.5%, less than 3%, less than 3.5%, less than 4%, less than 4.5%, less than 5%, less than 5.5%, less than 6%, less than 6.5%, less than 7%, less than 7.5%, less than 8%, less than 8.5%, less than 9%, less than 9.5%, less than 10%, less than 11%, less than 12%, less than 13%, less than 14%, less than 15%, less than 16%, less than 17%, less than 18%, less than 19%, or less than 20%. The number of indels formed at a nucleic acid region may depend on the amount of time a nucleic acid (e.g., a nucleic acid within the genome of a cell) is exposed to a base-editing system. In some embodiments, an number or proportion of indels is determined after at least 1 hour, at least 2 hours, at least 6 hours, at least 12 hours, at least 24 hours, at least 36 hours, at least 48 hours, at least 3 days, at least 4 days, at least 5 days, at least 7 days, at least 10 days, or at least 14 days of exposing a nucleic acid (e.g., a nucleic acid within the genome of a cell) to a base-editing system.

[0208] Some aspects of the disclosure are based on the recognition that any of the base-editing systems provided herein are capable of efficiently generating an intended mutation, such as a point mutation, in a nucleic acid (e.g. a nucleic acid within a genome of a subject) without generating a significant number of unintended mutations, such as unintended point mutations. In some embodiments, an intended mutation is a mutation that is generated by a specific base-editing system bound to a gRNA, specifically designed to generate the intended mutation. In some embodiments, the intended mutation is a mutation associated with a disease or disorder. In some embodiments, the intended mutation is a cytosine (C) to thymine (T) point mutation associated with a disease or disorder. In some embodiments, the intended mutation is a guanine (G) to adenine (A) point mutation associated with a disease or disorder. In some embodiments, the intended mutation is a cytosine (C) to thymine (T) point mutation within the coding region of a gene. In some embodiments, the intended mutation is a guanine (G) to adenine (A) point mutation within the coding region of a gene. In some embodiments, the intended mutation is a point mutation that generates a stop codon, for example, a premature stop codon within the coding region of a gene. In some embodiments, the intended mutation is a mutation that eliminates a stop codon. In some embodiments, the intended mutation is a mutation that alters the splicing of a gene. In some embodiments, the intended mutation is a mutation that alters the regulatory sequence of a gene (e.g., a gene promotor or gene repressor). In some embodiments, any of the base-editing systems provided herein are capable of generating a ratio of intended mutations to unintended mutations (e.g., intended point mutations:unintended point mutations) that is greater than 1:1. In some embodiments, any of the base-editing systems provided herein are capable of generating a ratio of intended mutations to unintended mutations (e.g., intended point mutations:unintended point mutations) that is at least 1.5:1, at least 2:1, at least 2.5:1, at least 3:1, at least 3.5:1, at least 4:1, at least 4.5:1, at least 5:1, at least 5.5:1, at least 6:1, at least 6.5:1, at least 7:1, at least 7.5:1, at least 8:1, at least 8.5:1, at least 9:1, at least 9.5:1, at least 10:1, at least 11:1, at least 12:1, at least 13:1, at least 14:1, at least 15:1, at least 16:1, at least 17:1, at least 18:1, at least 19:1, at least 20:1, at least 25:1, at least 30:1, at least 35:1, at least 40:1, at least 45:1, at least 50:1, at least 60:1, at least 70:1, at least 80:1, at least 90:1, at least 100:1, at least 150:1, at least 200:1, at least 250:1, at least 300:1, at least 350:1, at least 400:1, at least 450:1, at least 500:1, at least 550:1, at least 600:1, at least 650:1, at least 700:1, at least 750:1, at least 800:1, at least 850:1, at least 900:1, at least 950:1, or at least 1000:1. It should be appreciated that the characteristics of the base-editing systems described herein may be applied to any of the fusion proteins, or methods of using the fusion proteins provided herein.

[0209] Some aspects of the disclosure provide methods for editing a nucleic acid. In some embodiments, the method is a method for editing a nucleobase of a nucleic acid (e.g., a base pair of a double-stranded DNA sequence). In some embodiments, the method includes the steps of: a) contacting a target region of a nucleic acid (e.g., a double-stranded DNA sequence) with a complex including a base editor (e.g., a Cas9 domain fused to a cytidine deaminase domain) and a guide nucleic acid (e.g., gRNA), wherein the target region includes a targeted nucleobase pair, b) inducing strand separation of said target region, c) converting a first nucleobase of said target nucleobase pair in a single strand of the target region to a second nucleobase, and d) cutting no more than one strand of said target region, where a third nucleobase complementary to the first nucleobase base is replaced by a fourth nucleobase complementary to the second nucleobase; and the method results in less than 20% indel formation in the nucleic acid. It should be appreciated that in some embodiments, step b) is omitted. In some embodiments, the first nucleobase is a cytosine. In some embodiments, the second nucleobase is a deaminated cytosine, or a uracil. In some embodiments, the third nucleobase is a guanine. In some embodiments, the fourth nucleobase is an adenine. In some embodiments, the first nucleobase is a cytosine, the second nucleobase is a deaminated cytosine or a uracil, the third nucleobase is a guanine, and the fourth nucleobase is an adenine. In some embodiments, the method results in less than 19%, less than 18%, less than 17%, less than 16%, less than 15%, less than 14%, less than 13%, less than 12%, less than 11%, less than 10%, less than 9%, less than 8%, less than 7%, less than 6%, less than 5%, less than 4%, less than 3%, less than 2%, less than 1%, less than 0.5%, less than 0.2%, or less than 0.1% indel formation. In some embodiments, the method further includes replacing the second nucleobase with a fifth nucleobase that is complementary to the fourth nucleobase, thereby generating an intended edited base pair (e.g., C:G to T:A). In some embodiments, the fifth nucleobase is a thymine. In some embodiments, at least 5% of the intended basepairs are edited. In some embodiments, at least 10%, at least 15%, at least 20%, at least 25%, at least 30%, at least 35%, at least 40%, at least 45%, at least 50%, at least 55%, at least 60%, at least 65%, or at least 70% of the intended basepairs are edited.

[0210] Some aspects of the disclosure provide methods for editing a nucleic acid. In some embodiments, the method is a method for editing a nucleobase of a nucleic acid (e.g., a base pair of a double-stranded DNA sequence). In some embodiments, the method includes the steps of: a) contacting a target region of a nucleic acid (e.g., a double-stranded DNA sequence) with a complex including a base editor (e.g., a Cas12a domain fused to a cytidine deaminase domain) and a guide nucleic acid (e.g., gRNA), wherein the target region includes a targeted nucleobase pair, b) inducing strand separation of said target region, c) converting a first nucleobase of said target nucleobase pair in a single strand of the target region to a second nucleobase, and d) cutting no more than one strand of said target region, where a third nucleobase complementary to the first nucleobase base is replaced by a fourth nucleobase complementary to the second nucleobase; and the method results in less than 20% indel formation in the nucleic acid. It should be appreciated that in some embodiments, step b) is omitted. In some embodiments, the first nucleobase is a cytosine. In some embodiments, the second nucleobase is a deaminated cytosine, or a uracil. In some embodiments, the third nucleobase is a guanine. In some embodiments, the fourth nucleobase is an adenine. In some embodiments, the first nucleobase is a cytosine, the second nucleobase is a deaminated cytosine or a uracil, the third nucleobase is a guanine, and the fourth nucleobase is an adenine. In some embodiments, the method results in less than 19%, less than 18%, less than 17%, less than 16%, less than 15%, less than 14%, less than 13%, less than 12%, less than 11%, less than 10%, less than 9%, less than 8%, less than 7%, less than 6%, less than 5%, less than 4%, less than 3%, less than 2%, less than 1%, less than 0.5%, less than 0.2%, or less than 0.1% indel formation. In some embodiments, the method further includes replacing the second nucleobase with a fifth nucleobase that is complementary to the fourth nucleobase, thereby generating an intended edited base pair (e.g., C:G to T:A). In some embodiments, the fifth nucleobase is a thymine. In some embodiments, at least 5% of the intended basepairs are edited. In some embodiments, at least 10%, at least 15%, at least 20%, at least 25%, at least 30%, at least 35%, at least 40%, at least 45%, at least 50%, at least 55%, at least 60%, at least 65%, or at least 70% of the intended basepairs are edited.

[0211] Some aspects of the disclosure provide methods for editing a nucleic acid. In some embodiments, the method is a method for editing a nucleobase of a nucleic acid (e.g., a base pair of a double-stranded DNA sequence). In some embodiments, the method includes the steps of: a) contacting a target region of a nucleic acid (e.g., a double-stranded DNA sequence) with a complex including a base editor (e.g., a TALE domain fused to a cytidine deaminase domain) and a guide nucleic acid (e.g., gRNA), wherein the target region includes a targeted nucleobase pair, b) inducing strand separation of said target region, c) converting a first nucleobase of said target nucleobase pair in a single strand of the target region to a second nucleobase, and d) cutting no more than one strand of said target region, where a third nucleobase complementary to the first nucleobase base is replaced by a fourth nucleobase complementary to the second nucleobase; and the method results in less than 20% indel formation in the nucleic acid. It should be appreciated that in some embodiments, step b) is omitted. In some embodiments, the first nucleobase is a cytosine. In some embodiments, the second nucleobase is a deaminated cytosine, or a uracil. In some embodiments, the third nucleobase is a guanine. In some embodiments, the fourth nucleobase is an adenine. In some embodiments, the first nucleobase is a cytosine, the second nucleobase is a deaminated cytosine or a uracil, the third nucleobase is a guanine, and the fourth nucleobase is an adenine. In some embodiments, the method results in less than 19%, less than 18%, less than 17%, less than 16%, less than 15%, less than 14%, less than 13%, less than 12%, less than 11%, less than 10%, less than 9%, less than 8%, less than 7%, less than 6%, less than 5%, less than 4%, less than 3%, less than 2%, less than 1%, less than 0.5%, less than 0.2%, or less than 0.1% indel formation. In some embodiments, the method further includes replacing the second nucleobase with a fifth nucleobase that is complementary to the fourth nucleobase, thereby generating an intended edited base pair (e.g., C:G to T:A). In some embodiments, the fifth nucleobase is a thymine. In some embodiments, at least 5% of the intended basepairs are edited. In some embodiments, at least 10%, at least 15%, at least 20%, at least 25%, at least 30%, at least 35%, at least 40%, at least 45%, at least 50%, at least 55%, at least 60%, at least 65%, or at least 70% of the intended basepairs are edited.

[0212] Some aspects of the disclosure provide methods for editing a nucleic acid. In some embodiments, the method is a method for editing a nucleobase of a nucleic acid (e.g., a base pair of a double-stranded DNA sequence). In some embodiments, the method includes the steps of: a) contacting a target region of a nucleic acid (e.g., a double-stranded DNA sequence) with a complex including a base editor (e.g., a ZF domain fused to a cytidine deaminase domain) and a guide nucleic acid (e.g., gRNA), wherein the target region includes a targeted nucleobase pair, b) inducing strand separation of said target region, c) converting a first nucleobase of said target nucleobase pair in a single strand of the target region to a second nucleobase, and d) cutting no more than one strand of said target region, where a third nucleobase complementary to the first nucleobase base is replaced by a fourth nucleobase complementary to the second nucleobase; and the method results in less than 20% indel formation in the nucleic acid. It should be appreciated that in some embodiments, step b) is omitted. In some embodiments, the first nucleobase is a cytosine. In some embodiments, the second nucleobase is a deaminated cytosine, or a uracil. In some embodiments, the third nucleobase is a guanine. In some embodiments, the fourth nucleobase is an adenine. In some embodiments, the first nucleobase is a cytosine, the second nucleobase is a deaminated cytosine or a uracil, the third nucleobase is a guanine, and the fourth nucleobase is an adenine. In some embodiments, the method results in less than 19%, less than 18%, less than 17%, less than 16%, less than 15%, less than 14%, less than 13%, less than 12%, less than 11%, less than 10%, less than 9%, less than 8%, less than 7%, less than 6%, less than 5%, less than 4%, less than 3%, less than 2%, less than 1%, less than 0.5%, less than 0.2%, or less than 0.1% indel formation. In some embodiments, the method further includes replacing the second nucleobase with a fifth nucleobase that is complementary to the fourth nucleobase, thereby generating an intended edited base pair (e.g., C:G to T:A). In some embodiments, the fifth nucleobase is a thymine. In some embodiments, at least 5% of the intended basepairs are edited. In some embodiments, at least 10%, at least 15%, at least 20%, at least 25%, at least 30%, at least 35%, at least 40%, at least 45%, at least 50%, at least 55%, at least 60%, at least 65%, or at least 70% of the intended basepairs are edited.

[0213] In some embodiments, the ratio of intended products to unintended products in the target nucleotide is at least at least 10:1, at least 11:1, at least 12:1, at least 13:1, at least 14:1, at least 15:1, at least 16:1, at least 17:1, at least 18:1, at least 19:1, at least 20:1, at least 25:1, at least 30:1, at least 35:1, at least 40:1, at least 45:1, at least 50:1, at least 60:1, at least 70:1, at least 80:1, at least 90:1, at least 100:1, at least 150:1, or at least 200:1. In some embodiments, the ratio of intended point mutation to indel formation is greater than 1:1, greater than 10:1, greater than 50:1, greater than 100:1, greater than 500:1, or greater than 1000:1, or more. In some embodiments, the cut single strand (nicked strand) is hybridized to the guide nucleic acid. In some embodiments, the cut single strand is opposite to the strand including the first nucleobase. In some embodiments, the base-editing system includes a DNA binding domain (e.g., a Cas9 domain, a Cas12a domain, a Cas12h domain, a Cas12i domain, a CasX domain, a CasY domain, a C2c1 domain, a C2c2 domain, a C2c3 domain, a TALE domain, or a ZF domain). In some embodiments, the first base is cytosine, and the second base is not a G, C, A, or T. In some embodiments, the second base is uracil. In some embodiments, the first base is cytosine. In some embodiments, the second base is not a G, C, A, or T. In some embodiments, the second base is uracil. In some embodiments, the base-editing system inhibits base excision repair of the edited strand. In some embodiments, the base-editing system protects or binds the non-edited strand. In some embodiments, the base-editing system includes npUGI activity. In some embodiments, the base-editing system includes nickase activity. In some embodiments, the intended edited basepair is upstream of a PAM site. In some embodiments, the intended edited base pair is 1, 2, 3, 4, 5, 6, 7, 8, 9, 10, 11, 12, 13, 14, 15, 16, 17, 18, 19, or 20 nucleotides upstream of the PAM site. In some embodiments, the intended edited basepair is downstream of a PAM site. In some embodiments, the intended edited base pair is 1, 2, 3, 4, 5, 6, 7, 8, 9, 10, 11, 12, 13, 14, 15, 16, 17, 18, 19, or 20 nucleotides downstream of the PAM site. In some embodiments, the method does not require a canonical (e.g., NGG) PAM site. In some embodiments, the nucleobase-editing system includes a linker. In some embodiments, the linker is in the range of 1-25 amino acids in length. In some embodiments, the linker is in the range of 5-20 amino acids in length. In some embodiments, the linker is 10, 11, 12, 13, 14, 15, 16, 17, 18, 19, or 20 amino acids in length. In some embodiments, the target region includes a target window, wherein the target window includes the target nucleobase pair. In some embodiments, the target window is in the range of 1-10 nucleotides. In some embodiments, the target window is in the range of 1-9, 1-8, 1-7, 1-6, 1-5, 1-4, 1-3, 1-2, or 1 nucleotides in length. In some embodiments, the target window is 1, 2, 3, 4, 5, 6, 7, 8, 9, 10, 11, 12, 13, 14, 15, 16, 17, 18, 19, or 20 nucleotides in length. In some embodiments, the intended edited base pair is within the target window. In some embodiments, the target window includes the intended edited base pair. In some embodiments, the method is performed using any of the base-editing systems provided herein. In some embodiments, the target window is a deamination window

[0214] In some embodiments, the disclosure provides methods for editing a nucleotide. In some embodiments, the disclosure provides a method for editing a nucleobase pair of a double-stranded DNA sequence. In some embodiments, the method includes a) contacting a target region of the double-stranded DNA sequence with a complex including a base-editing system and a guide nucleic acid (e.g., gRNA), where the target region includes a target nucleobase pair, b) inducing strand separation of said target region, c) converting a first nucleobase of said target nucleobase pair in a single strand of the target region to a second nucleobase, d) cutting no more than one strand of said target region, wherein a third nucleobase complementary to the first nucleobase base is replaced by a fourth nucleobase complementary to the second nucleobase, and the second nucleobase is replaced with a fifth nucleobase that is complementary to the fourth nucleobase, thereby generating an intended edited basepair, wherein the efficiency of generating the intended edited basepair is at least 5%. It should be appreciated that in some embodiments, step b is omitted. In some embodiments, at least 5% of the intended basepairs are edited. In some embodiments, at least 10%, at least 15%, at least 20%, at least 25%, at least 30%, at least 35%, at least 40%, at least 45%, at least 50%, at least 55%, at least 60%, at least 65%, or at least 70% of the intended basepairs are edited. In some embodiments, the method causes less than 19%, less than 18%, less than 17%, less than 16%, less than 15%, less than 14%, less than 13%, less than 12%, less than 11%, less than 10%, less than 9%, less than 8%, less than 7%, less than 6%, less than 5%, less than 4%, less than 3%, less than 2%, less than 1%, less than 0.5%, less than 0.2%, or less than 0.1% indel formation. In some embodiments, the ratio of intended product to unintended products at the target nucleotide is at least at least 2:1, at least 2.5:1, at least 3:1, at least 3.5:1, at least 4:1, at least 4.5:1, at least 5:1, at least 5.5:1, at least 6:1, at least 6.5:1, at least 7:1, at least 7.5:1, at least 8:1, at least 8.5:1, at least 9:1, at least 9.5:1, at least 10:1, at least 11:1, at least 12:1, at least 13:1, at least 14:1, at least 15:1, at least 16:1, at least 17:1, at least 18:1, at least 19:1, at least 20:1, at least 25:1, at least 30:1, at least 35:1, at least 40:1, at least 45:1, at least 50:1, at least 60:1, at least 70:1, at least 80:1, at least 90:1, at least 100:1, at least 150:1, or at least 200:1. In some embodiments, the ratio of intended point mutation to indel formation is greater than 1:1, 10:1, 50:1, 100:1, 500:1, or 1000:1. In some embodiments, the cut single strand is hybridized to the guide nucleic acid. In some embodiments, the cut single strand is opposite to the strand including the first nucleobase. In some embodiments, the first base is cytosine. In some embodiments, the second nucleobase is not G, C, A, or T. In some embodiments, the second base is uracil. In some embodiments, the base-editing system inhibits base excision repair of the edited strand. In some embodiments, the base-editing system protects or binds the non-edited strand. In some embodiments, the base-editing system includes npUGI activity. In some embodiments, the nucleobase edit includes nickase activity. In some embodiments, the intended edited basepair is upstream of a PAM site. In some embodiments, the intended edited base pair is 1, 2, 3, 4, 5, 6, 7, 8, 9, 10, 11, 12, 13, 14, 15, 16, 17, 18, 19, or 20 nucleotides upstream of the PAM site. In some embodiments, the intended edited basepair is downstream of a PAM site. In some embodiments, the intended edited base pair is 1, 2, 3, 4, 5, 6, 7, 8, 9, 10, 11, 12, 13, 14, 15, 16, 17, 18, 19, or 20 nucleotides downstream stream of the PAM site. In some embodiments, the method does not require a canonical (e.g., NGG) PAM site. In some embodiments, the base-editing system includes a linker. In some embodiments, the linker is in the range of 1-25 amino acids in length. In some embodiments, the linker is in the range of 5-20 amino acids in length. In some embodiments, the linker is 10, 11, 12, 13, 14, 15, 16, 17, 18, 19, or 20 amino acids in length. In some embodiments, the target region includes a target window, wherein the target window includes the target nucleobase pair. In some embodiments, the target window is in the range of 1-10 nucleotides. In some embodiments, the target window is in the range of 1-9, 1-8, 1-7, 1-6, 1-5, 1-4, 1-3, 1-2, or 1 nucleotides in length. In some embodiments, the target window is 1, 2, 3, 4, 5, 6, 7, 8, 9, 10, 11, 12, 13, 14, 15, 16, 17, 18, 19, or 20 nucleotides in length. In some embodiments, the intended edited base pair occurs within the target window. In some embodiments, the target window includes the intended edited base pair. In some embodiments, the base-editing system is any one of the base-editing systems provided herein.

### Kits, Vectors, and Cells

[0215] Some aspects of this disclosure provide kits including a nucleic acid construct, including (a) a nucleotide sequence encoding a Cas9 protein, a Cas12a protein, a Cas12h protein, a Cas12i protein, a CasX protein, a CasY protein, a C2c1 protein, a C2c2 protein, a C2c3 protein, a TALE protein, or a ZF protein or a Cas9 base-editing system, a Cas12a base-editing system, a Cas12h base-editing system, a Cas12i base-editing system, a CasX base-editing system, a CasY base-editing system, a C2c1 base-editing system, a C2c2 base-editing system, a C2c3 base-editing system, an Argonaute base-editing system, a TALE base-editing system, or a ZF base-editing system as provided herein; and (b) a heterologous promoter that drives expression of the sequence of (a). In some embodiments, the promoter is inducible, tissue-specific, or organism specific. In some embodiments, the kit further includes an expression construct encoding a guide RNA backbone, wherein the construct includes a cloning site positioned to allow the cloning of a nucleic acid sequence identical or complementary to a target sequence into the guide RNA backbone.

[0216] Some aspects of this disclosure provide polynucleotides encoding a Cas9 protein, a Cas12a protein, a Cas12h protein, a Cas12i protein, a CasX protein, a CasY protein, a C2c1 protein, a C2c2 protein, a C2c3 protein, an Argonaute protein, a TALE protein, or a ZF protein or a Cas9 base-editing system, a Cas12a base-editing system, a Cas12h base-editing system, a Cas12i base-editing system, a CasX base-editing system, a CasY base-editing system, a C2c1 base-editing system, a C2c2 base-editing system, a C2c3 base-editing system, an Argonaute base-editing system, a TALE base-editing system, or a ZF base-editing system as provided herein. Some aspects of this disclosure provide vectors including such polynucleotides. In some embodiments, the vector includes a heterologous promoter driving expression of the polynucleotide. In some embodiments, the vector is delivered by PEG-mediated transfection.

[0217] Some aspects of this disclosure provide cells including a Cas9 protein, a Cas12a protein, a Cas12h protein, a Cas12i protein, a CasX protein, a CasY protein, a C2c1 protein, a C2c2 protein, a C2c3 protein, an Argonaute protein, a TALE protein, or a ZF protein or a Cas9 base-editing system, a Cas12a base-editing system, a Cas12h base-editing system, a Cas12i base-editing system, a CasX base-editing system, a CasY base-editing system, a C2c1 base-editing system, a C2c2 base-editing system, a C2c3 base-editing system, an Argonaute base-editing system, a TALE base-editing system, or a ZF base-editing system, a nucleic acid molecule encoding the DNA binding base-editing system, a complex include a Cas9 protein, a Cas12a protein, a Cas12h protein, a Cas12i protein, a CasX protein, a CasY protein, a C2c1 protein, a C2c2 protein, a C2c3 protein, an Argonaute protein, a TALE protein, or a ZF protein and the gRNA, and/or a vector as provided herein.

[0218] The description of exemplary embodiments of the base-editing systems above is provided for illustration purposes only and not meant to be limiting. Additional base-editing systems, e.g., variations of the exemplary systems described in detail above, are also embraced by this disclosure.

[0219] Those skilled in the art will recognize, or be able to ascertain using no more than routine experimentation, many equivalents of the embodiments described herein. The scope of the present disclosure is not intended to be limited to the above description, but rather is as set forth in the appended claims.

[0220] Articles such as “a,” “an,” and “the” may mean one or more than one unless indicated to the contrary or otherwise evident from the context. Claims or descriptions that include “or” between two or more members of a group are considered satisfied if one, more than one, or all of the group members are present, unless indicated to the contrary or otherwise evident from the context. The disclosure of a group that includes “or” between two or more group members provides embodiments in which exactly one member of the group is present, embodiments in which more than one members of the group are present, and embodiments in which all of the group members are present. For purposes of brevity those embodiments have not been individually spelled out herein, but it will be understood that each of these embodiments is provided herein and may be specifically claimed or disclaimed.

[0221] The term “mutation,” as used herein, refers to a substitution of a residue within a sequence, e.g., a nucleic acid or amino acid sequence, with another residue, or a deletion or insertion of one or more residues within a sequence. Mutations are typically described herein by identifying the original residue followed by the position of the residue within the sequence and by the identity of the newly substituted residue. Various methods for making the amino acid substitutions (mutations) provided herein are well known in the art, and are provided by, for example, Green and Sambrook, Molecular Cloning: A Laboratory Manual (4 ed., Cold Spring Harbor Laboratory Press, Cold Spring Harbor, N.Y. (2012)).

[0222] The terms “nucleic acid” and “nucleic acid molecule,” as used herein, refer to a compound including a nucleobase and an acidic moiety, e.g., a nucleoside, a nucleotide, or a polymer of nucleotides. Typically, polymeric nucleic acids, e.g., nucleic acid molecules including three or more nucleotides are linear molecules, in which adjacent nucleotides are linked to each other via a phosphodiester linkage. In some embodiments, “nucleic acid” refers to individual nucleic acid residues (e.g. nucleotides and/or nucleosides). In some embodiments, “nucleic acid” refers to an oligonucleotide chain including three or more individual nucleotide residues. As used herein, the terms “oligonucleotide” and “polynucleotide” can be used interchangeably to refer to a polymer of nucleotides (e.g., a string of at least three nucleotides). In some embodiments, “nucleic acid” encompasses RNA as well as single and/or double-stranded DNA. Nucleic acids may be naturally occurring, for example, in the context of a genome, a transcript, an mRNA, tRNA, rRNA, siRNA, snRNA, a plasmid, cosmid, chromosome, chromatid, or other naturally occurring nucleic acid molecule. On the other hand, a nucleic acid molecule may be a non-naturally occurring molecule, e.g., a recombinant DNA or RNA, an artificial chromosome, an engineered genome, or portion thereof, or a synthetic DNA, RNA, DNA/RNA hybrid, or including non-naturally occurring nucleotides or nucleosides. Furthermore, the terms “nucleic acid,” “DNA,” “RNA,” and/or similar terms include nucleic acid analogs, e.g., analogs having other than a phosphodiester backbone. Nucleic acids can be purified from natural sources, produced using recombinant expression systems and optionally purified, chemically synthesized, etc. Where appropriate, e.g., in the case of chemically synthesized molecules, nucleic acids can include nucleoside analogs such as analogs having chemically modified bases or sugars, and backbone modifications. A nucleic acid sequence is presented in the 5′ to 3′ direction unless otherwise indicated. In some embodiments, a nucleic acid is or includes natural nucleosides (e.g. adenosine, thymidine, guanosine, cytidine, uridine, deoxyadenosine, deoxythymidine, deoxyguanosine, and deoxycytidine); nucleoside analogs (e.g., 2-aminoadenosine, 2-thiothymidine, inosine, pyrrolo-pyrimidine, 3-methyl adenosine, 5-methylcytidine, 2-aminoadenosine, C5-bromouridine, C5-fluorouridine, C5-iodouridine, C5-propynyl-uridine, C5-propynyl-cytidine, C5-methylcytidine, 2-aminoadenosine, 7-deazaadenosine, 7-deazaguanosine, 8-oxoadenosine, 8-oxoguanosine, 0 (6)-methylguanine, and 2-thiocytidine); chemically modified bases; biologically modified bases (e.g., methylated bases); intercalated bases; modified sugars (e.g., 2′-fluororibose, ribose, 2′-deoxyribose, arabinose, and hexose); and/or modified phosphate groups (e.g., phosphorothioates and 5′-N-phosphoramidite linkages).

[0223] The term “nucleic acid editing domain,” as used herein refers to a protein or enzyme capable of making one or more modifications (e.g., deamination of a cytidine residue) to a nucleic acid (e.g., DNA or RNA). Exemplary nucleic acid editing domains include, but are not limited to a deaminase, a nuclease, a nickase, a recombinase, a methyltransferase, a methylase, an acetylase, an acetyltransferase, a transcriptional activator, or a transcriptional repressor domain. In some embodiments the nucleic acid editing domain is a deaminase (e.g., a cytidine deaminase, such as an APOBEC or an AID deaminase).

[0224] The term “effective amount,” as used herein, refers to an amount of a biologically active agent that is sufficient to elicit a desired biological response. For example, in some embodiments, an effective amount of a nuclease may refer to the amount of the nuclease that is sufficient to induce cleavage of a target site specifically bound and cleaved by the nuclease. In some embodiments, an effective amount of a base-editing system provided herein, e.g., of a base-editing system including a nuclease inactive Cas domain (e.g., a nuclease inactive Cas9 domain or a nuclease inactive Cas12a domain) and a nucleic acid editing domain (e.g., a deaminase domain) may refer to the amount of the base-editing system that is sufficient to induce editing of a target site specifically bound and edited by the base-editing system. As will be appreciated by the skilled artisan, the effective amount of an agent, e.g., a base-editing system, a nuclease, a deaminase, a recombinase, a hybrid protein, a protein dimer, a complex of a protein (or protein dimer) and a polynucleotide, or a polynucleotide, may vary depending on various factors as, for example, on the desired biological response, e.g., on the specific allele, genome, or target site to be edited, on the cell or tissue being targeted, and on the agent being used.

[0225] The term “linker,” as used herein, refers to a chemical group or a molecule linking two molecules or moieties, e.g., two domains of a base-editing system, such as, for example, a nuclease inactive Cas domain (e.g., a nuclease inactive Cas9 domain or a nuclease inactive Cas12a domain) and a nucleic acid editing domain (e.g., a deaminase domain). In some embodiments, a linker joins a gRNA binding domain of an RNA-programmable nuclease, including a Cas nuclease domain (e.g., a Cas9 nuclease domain or a Cas12a nuclease domain), and the catalytic domain of a nucleic-acid editing protein. In some embodiments, a linker joins a dCas domain (e.g., a dCas9 domain or a dCas12a domain) and a nucleic-acid editing protein. Typically, the linker is positioned between, or flanked by, two groups, molecules, or other moieties and connected to each one via a covalent bond, thus connecting the two. In some embodiments, the linker is an amino acid or a plurality of amino acids (e.g., a peptide or protein). In some embodiments, the linker is an organic molecule, group, polymer, or chemical moiety. In some embodiments, the linker is in the range of 5-100 amino acids in length. In some embodiments, the linker is 5, 6, 7, 8, 9, 10, 11, 12, 13, 14, 15, 16, 17, 18, 19, 20, 21, 22, 23, 24, 25, 26, 27, 28, 29, 30, 30-35, 35-40, 40-45, 45-50, 50-60, 60-70, 70-80, 80-90, 90-100, 100-150, or 150-200 amino acids in length. Longer or shorter linkers are also contemplated.

[0226] The term “proliferative disease,” as used herein, refers to any disease in which cell or tissue homeostasis is disturbed in that a cell or cell population exhibits an abnormally elevated proliferation rate. Proliferative diseases include hyperproliferative diseases, such as pre-neoplastic hyperplastic conditions and neoplastic diseases. Neoplastic diseases are characterized by an abnormal proliferation of cells and include both benign and malignant neoplasias. Malignant neoplasia is also referred to as cancer.

[0227] The terms “protein,” “peptide,” and “polypeptide” are used interchangeably herein, and refer to a polymer of amino acid residues linked together by peptide (amide) bonds. The terms refer to a protein, peptide, or polypeptide of any size, structure, or function. Typically, a protein, peptide, or polypeptide will be at least three amino acids long. A protein, peptide, or polypeptide may refer to an individual protein or a collection of proteins. One or more of the amino acids in a protein, peptide, or polypeptide may be modified, for example, by the addition of a chemical entity such as a carbohydrate group, a hydroxyl group, a phosphate group, a farnesyl group, an isofarnesyl group, a fatty acid group, a linker for conjugation, functionalization, or other modification, etc. A protein, peptide, or polypeptide may also be a single molecule or may be a multi-molecular complex. A protein, peptide, or polypeptide may be just a portion of a naturally occurring protein or peptide. A protein, peptide, or polypeptide may be naturally occurring, recombinant, or synthetic, or any combination thereof. The term “base-editing system” as used herein refers to a hybrid molecule which includes protein domains from at least two different proteins, and non-protein domains that may or may not be chemically linked to the hybrid molecule. One protein may be located at the amino-terminal (N-terminal) portion of the base-editing system or at the carboxy-terminal (C-terminal) protein thus forming an “amino-terminal base-editing system” or a “carboxy-terminal base-editing system,” respectively. A base-editing system may include different domains, for example, a nucleic acid binding domain (e.g., the gRNA binding domain of Cas9 that directs the binding of the protein to a target site) and a nucleic acid cleavage domain or a catalytic domain of a nucleic-acid editing protein. In some embodiments, a base-editing system includes a proteinaceous part, e.g., an amino acid sequence constituting a nucleic acid binding domain, and an organic compound, e.g., a compound that can act as a nucleic acid cleavage agent. In some embodiments, a base-editing system is in a complex with, or is in association with, a nucleic acid, e.g., RNA. Any of the base-editing systems provided herein may be produced by any method known in the art. For example, the base-editing systems provided herein may be produced via recombinant expression and purification, which is especially suited for base-editing systems including a peptide linker. Methods for recombinant expression and purification are well known, and include those described by Green and Sambrook, Molecular Cloning: A Laboratory Manual (4th ed., Cold Spring Harbor Laboratory Press, Cold Spring Harbor, N.Y. (2012)).

[0228] The term “subject,” as used herein, refers to an individual organism, for example, an individual mammal. In some embodiments, the subject is a human. In some embodiments, the subject is a non-human mammal. In some embodiments, the subject is a non-human primate. In some embodiments, the subject is a rodent. In some embodiments, the subject is a sheep, a goat, a cattle, a cat, or a dog. In some embodiments, the subject is a vertebrate, an amphibian, a reptile, a fish, an insect, a fly, or a nematode. In some embodiments, the subject is a research animal. In some embodiments, the subject is genetically engineered, e.g., a genetically engineered non-human subject. The subject may be of either sex and at any stage of development.

[0229] The term “target site” refers to a sequence within a nucleic acid molecule that is deaminated by a deaminase or a base-editing system including a deaminase, (e.g., a dCas9-deaminase base-editing system provided herein).

[0230] The terms “treatment,” “treat,” and “treating,” refer to a clinical intervention aimed to reverse, alleviate, delay the onset of, or inhibit the progress of a disease or disorder, or one or more symptoms thereof, as described herein. As used herein, the terms “treatment,” “treat,” and “treating” refer to a clinical intervention aimed to reverse, alleviate, delay the onset of, or inhibit the progress of a disease or disorder, or one or more symptoms thereof, as described herein. In some embodiments, treatment may be administered after one or more symptoms have developed and/or after a disease has been diagnosed. In other embodiments, treatment may be administered in the absence of symptoms, e.g., to prevent or delay onset of a symptom or inhibit onset or progression of a disease. For example, treatment may be administered to a susceptible individual prior to the onset of symptoms (e.g., in light of a history of symptoms and/or in light of genetic or other susceptibility factors). Treatment may also be continued after symptoms have resolved, for example, to prevent or delay their recurrence.

[0231] The term “recombinant” as used herein in the context of proteins or nucleic acids refers to proteins or nucleic acids that do not occur in nature, but are the product of human engineering. For example, in some embodiments, a recombinant protein or nucleic acid molecule includes an amino acid or nucleotide sequence that includes at least one, at least two, at least three, at least four, at least five, at least six, or at least seven mutations as compared to any naturally occurring sequence.

[0232] It is to be understood that the invention encompasses all variations, combinations, and permutations in which one or more limitation, element, clause, or descriptive term, from one or more of the claims or from one or more relevant portion of the description, is introduced into another claim. For example, a claim that is dependent on another claim can be modified to include one or more of the limitations found in any other claim that is dependent on the same base claim. Furthermore, where the claims recite a composition, it is to be understood that methods of making or using the composition according to any of the methods of making or using disclosed herein or according to methods known in the art, if any, are included, unless otherwise indicated or unless it would be evident to one of ordinary skill in the art that a contradiction or inconsistency would arise.

[0233] Where ranges are given, endpoints are included. Furthermore, it is to be understood that unless otherwise indicated or otherwise evident from the context and/or the understanding of one of ordinary skill in the art, values that are expressed as ranges can assume any specific value within the stated ranges in some embodiments, to the tenth of the unit of the lower limit of the range, unless the context clearly dictates otherwise. For purposes of brevity, the values in each range have not been individually spelled out herein, but it will be understood that each of these values is provided herein and may be specifically claimed or disclaimed. It is also to be understood that unless otherwise indicated or otherwise evident from the context and/or the understanding of one of ordinary skill in the art, values expressed as ranges can assume any subrange within the given range, wherein the endpoints of the subrange are expressed to the same degree of accuracy as the tenth of the unit of the lower limit of the range.

[0234] In addition, it is to be understood that any particular embodiment of the present invention may be explicitly excluded from any one or more of the claims. Where ranges are given, any value within the range may explicitly be excluded from any one or more of the claims. Any embodiment, element, feature, application, or aspect of the compositions and/or methods of the invention, can be excluded from any one or more claims. For purposes of brevity, all of the embodiments in which one or more elements, features, purposes, or aspects is excluded are not set forth explicitly herein.

[0235] Having generally described this invention, the same will be better understood by reference to certain specific examples, which are included herein to further illustrate the invention and are not intended to limit the scope of the invention as defined by the claims.

### EXAMPLES

[0236] The present disclosure is described in further detail in the following examples which are not in any way intended to limit the scope of the disclosure as claimed. The following examples are offered to illustrate, but not to limit the claimed disclosure.

### Example 1: Deoxyuracil-Modified Guide RNA Inhibition of Uracil-DNA Glycosylase

### Materials and Methods

[0237] A Cas12a fully processed crRNA sequence is chemically synthesized (Integrated DNA Technologies, Coralville, Iowa, USA) and encoded with the ‘spacer’ sequence ‘TTCAGGAGAAGCATGGTTCTA’ (SEQ ID NO: 384). The spacer sequence targets the Zea mays phytoene desaturase (PDS) gene (LOC542329, SEQ ID NO: 382) at base C3488. This targeting mutates the wild-type PDS amino acid sequence (SEQ ID NO: 383) to yield a protein with the amino acid mutation H298Y (SEQ ID NO: 386). The Z. mays inbred B73 is used.

[0238] The 5′-phosphorylated, uracil-containing DNA oligonucleotide ‘Phos-AUCUAUCUAUCUAUCUAUCU’ (SEQ ID NO: 385) is chemically synthesized (Integrated DNA Technologies, Coralville, Iowa, USA). The RNA and DNA oligonucleotides are mixed and ligated into a single RNA-DNA hybrid using T4 RNA Ligase 1 (New England Biolabs, Ipswich, Mass., USA).

[0239] A cytosine deaminase base editing system is generated in vitro by complexing a purified CRISPR-deaminase (cytosine base editor) with the RNA-DNA hybrid guide RNA, of protein and guide RNA(s) targeting the B73 Z. mays PDS gene (LOC542329, SEQ ID NO: 382) is subsequently delivered by PEG-mediated transfection.

### Results

[0240] The Z. mays PDS gene will be edited at C3488. The Z. mays PDS protein will include the amino acid mutation H298Y (i.e., will be SEQ ID NO: 386).

### Example 2: Nucleic Acid Inhibition of Uracil-DNA Glycosylase

### Materials and Methods

[0241] A short, double-stranded RNA is synthesized to target the 21-nt sequence AAATACCTTCTAGCTTAGGTA (SEQ ID NO: 381) of the Zea mays uracil-DNA glycosylase mRNA transcript (SEQ ID NO: 380). This sequence is synthesized with well-characterized structural elements for binding to the endogenous AGO RNA-silencing machinery. The Z. mays inbred B73 is used.

[0242] Exogenous RNA is co-delivered to Z. mays mid-leaf protoplasts using PEG-mediated transfection along with a vector-encoded cytosine base editor (e.g., the fusion protein of the base-editing system) driven by the ZmUBI1 promoter and guide RNA specific to the B73 Z. mays PDS gene (LOC542329, SEQ ID NO: 382).

### Results

[0243] The Z. mays PDS gene will be edited at C3488. The Z. mays PDS protein will include the amino acid mutation H298Y (i.e., will be SEQ ID NO: 386).

### Example 3: Small Molecule Inhibition of Uracil-DNA Glycosylase

### Materials and Methods

[0244] Isolated mid-leaf protoplasts from Zea mays are cultured in media supplemented with 1-methoxyethyl-6-(p-n-octylanilino) uracil (CID: 129848789) or related compound(s) (see section “Small molecule inhibitors of uracil-DNA glycosylase”). The Z. mays inbred B73 is used.

[0245] A cytosine deaminase base editing system composed of protein and guide RNA(s) targeting the B73 Z. mays PDS gene (LOC542329, SEQ ID NO: 382) is subsequently delivered by PEG-mediated transfection.

### Results

[0246] The Z. mays PDS gene will be edited at C3488. The Z. mays PDS protein will include the amino acid mutation H298Y (i.e., will be SEQ ID NO: 386).

### Example 4: Deoxyuracil-Modified Guide RNA, Nucleic Acid Knockdown, or Small Molecule Inhibition of Uracil-DNA Glycosylase in Glycine Max

### Materials and Methods

[0247] A Cas12a fully processed crRNA sequence is chemically synthesized (Integrated DNA Technologies, Coralville, Iowa, USA) encoded with the ‘spacer’ sequence, which targets the Glycine max phytoene desaturase (PDS) to yield an amino acid mutation.

[0248] The 5′-phosphorylated, uracil-containing DNA a oligonucleotide is chemically synthesized (Integrated DNA Technologies, Coralville, Iowa, USA). The RNA and DNA oligonucleotides are mixed and ligated into a single RNA-DNA hybrid using T4 RNA Ligase 1 (New England Biolabs, Ipswich, NIA, USA). A cytosine deaminase base editing system is generated in vitro by complexing a purified CRISPR-deaminase (cytosine base editor) with the RNA-DNA hybrid guide RNA, of protein and guide RNA(s) targeting the G. max PDS gene is subsequently delivered by PEG-mediated transfection.

[0249] Alternatively, a short, double-stranded RNA is synthesized to target a 21-nt sequence of the G. max uracil-DNA glycosylase mRNA transcript. This sequence is synthesized with well-characterized structural elements for binding to the endogenous AGO RNA-silencing machinery. Exogenous RNA is co-delivered to G. max mid-leaf protoplasts using PEG-mediated transfection along with a vector-encoded cytosine base editor (e.g., the fusion protein of the base-editing system) driven by a promoter and guide RNA specific to the G. max PDS gene.

[0250] In yet another alternative, isolated mid-leaf protoplasts from G. max are cultured in media supplemented with 1-methoxyethyl-6-(p-n-octylanilino) uracil (CID: 129848789) or related compound(s) (see section “Small molecule inhibitors of uracil-DNA glycosylase”). A cytosine deaminase base editing system composed of protein and guide RNA(s) targeting the G. max PDS gene is subsequently delivered by PEG-mediated transfection.

### Results

[0251] The G. max PDS gene will be edited. The G. max PDS protein will include a targeted amino acid alteration (e.g., a single amino acid change, a point mutation, etc.).

1. A base-editing system comprising
(i) a fusion protein comprising (a) a DNA-binding domain and (b) a cytidine deaminase domain; and
(ii) a non-protein uracil-DNA glycosylase inhibitor (npUGI), wherein the npUGI is a small molecule inhibitor of UDG.

2. The base-editing system of claim 1, wherein the DNA-binding domain is selected from the group consisting of a Cas domain, a Transcription Activator-Like Effector (TALE) domain, and a Zinc finger (ZF) domain.

3. The base-editing system of claim 2, wherein the Cas domain is selected from the group consisting of a Cas 9 domain, a Cas12a domain, a Cas12h domain, a Cas12i domain, a CasX domain, a CasY domain, a C2c1 domain, a C2c2 domain, and a C2c3 domain.

4. The base-editing system of claim 3, wherein the Cas domain is a Cas12a domain.

5. The base-editing system of claim 4, wherein the Cas12a domain comprises an amino acid sequence with at least 85% sequence identity, at least 90% sequence identity, at least 95% sequence identity, or at least 99% sequence identity to SEQ ID NO: 350, SEQ ID NO: 351, SEQ ID NO: 352, SEQ ID NO: 353, SEQ ID NO: 354, SEQ ID NO: 355, SEQ ID NO: 356, SEQ ID NO: 357, SEQ ID NO: 358, SEQ ID NO: 359, SEQ ID NO: 360, SEQ ID NO: 361, SEQ ID NO: 362, SEQ ID NO: 363, SEQ ID NO: 364, SEQ ID NO: 365, SEQ ID NO: 390, SEQ ID NO: 391, SEQ ID NO: 392, SEQ ID NO: 393, SEQ ID NO: 394, SEQ ID NO: 395, SEQ ID NO: 396, SEQ ID NO: 397, SEQ ID NO: 398, SEQ ID NO: 399, SEQ ID NO: 400, SEQ ID NO: 401, SEQ ID NO: 403, SEQ ID NO: 404, SEQ ID NO: 405, SEQ ID NO: 406, SEQ ID NO: 407, SEQ ID NO: 408, SEQ ID NO: 409, SEQ ID NO: 410, SEQ ID NO: 411, SEQ ID NO: 412, or SEQ ID NO: 413.

6. The base-editing system of claim 4, wherein the Cas12a domain is SEQ ID NO: 350, SEQ ID NO: 351, SEQ ID NO: 352, SEQ ID NO: 353, SEQ ID NO: 354, SEQ ID NO: 355, SEQ ID NO: 356, SEQ ID NO: 357, SEQ ID NO: 358, SEQ ID NO: 359, SEQ ID NO: 360, SEQ ID NO: 361, SEQ ID NO: 362, SEQ ID NO: 363, SEQ ID NO: 364, SEQ ID NO: 365, SEQ ID NO: 390, SEQ ID NO: 391, SEQ ID NO: 392, SEQ ID NO: 393, SEQ ID NO: 394, SEQ ID NO: 395, SEQ ID NO: 396, SEQ ID NO: 397, SEQ ID NO: 398, SEQ ID NO: 399, SEQ ID NO: 400, SEQ ID NO: 401, SEQ ID NO: 403, SEQ ID NO: 404, SEQ ID NO: 405, SEQ ID NO: 406, SEQ ID NO: 407, SEQ ID NO: 408, SEQ ID NO: 409, SEQ ID NO: 410, SEQ ID NO: 411, SEQ ID NO: 412, or SEQ ID NO: 413.

7. The base-editing system of claim 3, wherein the Cas domain is a Cas9 domain.

8. The base-editing system of claim 7, wherein the Cas9 domain comprises an amino acid sequence with at least 85% sequence identity, at least 90% sequence identity, at least 95% sequence identity, or at least 99% sequence identity to SEQ ID NO: 10, SEQ ID NO: 11, SEQ ID NO: 12, SEQ ID NO: 13, SEQ ID NO: 14, SEQ ID NO: 15, SEQ ID NO: 16, SEQ ID NO: 17, SEQ ID NO: 18, SEQ ID NO: 19, SEQ ID NO: 20, SEQ ID NO: 21, SEQ ID NO: 22, SEQ ID NO: 23, SEQ ID NO: 24, SEQ ID NO: 25, SEQ ID NO: 26, SEQ ID NO: 27, SEQ ID NO: 28, SEQ ID NO: 29, SEQ ID NO: 30, SEQ ID NO: 31, SEQ ID NO: 32, SEQ ID NO: 33, SEQ ID NO: 34, SEQ ID NO: 35, SEQ ID NO: 36, SEQ ID NO: 37, SEQ ID NO: 38, SEQ ID NO: 39, SEQ ID NO: 40, SEQ ID NO: 41, SEQ ID NO: 42, SEQ ID NO: 43, SEQ ID NO: 44, SEQ ID NO: 45, SEQ ID NO: 46, SEQ ID NO: 47, SEQ ID NO: 48, SEQ ID NO: 49, SEQ ID NO: 50, SEQ ID NO: 51, SEQ ID NO: 52, SEQ ID NO: 53, SEQ ID NO: 54, SEQ ID NO: 55, SEQ ID NO: 56, SEQ ID NO: 57, SEQ ID NO: 58, SEQ ID NO: 59, SEQ ID NO: 60, SEQ ID NO: 61, SEQ ID NO: 62, SEQ ID NO: 63, SEQ ID NO: 64, SEQ ID NO: 65, SEQ ID NO: 66, SEQ ID NO: 67, SEQ ID NO: 68, SEQ ID NO: 69, SEQ ID NO: 70, SEQ ID NO: 71, SEQ ID NO: 72, SEQ ID NO: 73, SEQ ID NO: 74, SEQ ID NO: 75, SEQ ID NO: 76, SEQ ID NO: 77, SEQ ID NO: 78, SEQ ID NO: 79, SEQ ID NO: 80, SEQ ID NO: 81, SEQ ID NO: 82, SEQ ID NO: 83, SEQ ID NO: 84, SEQ ID NO: 85, SEQ ID NO: 86, SEQ ID NO: 87, SEQ ID NO: 88, SEQ ID NO: 89, SEQ ID NO: 90, SEQ ID NO: 91, SEQ ID NO: 92, SEQ ID NO: 93, SEQ ID NO: 94, SEQ ID NO: 95, SEQ ID NO: 96, SEQ ID NO: 97, SEQ ID NO: 98, SEQ ID NO: 99, SEQ ID NO: 100, SEQ ID NO: 101, SEQ ID NO: 102, SEQ ID NO: 103, SEQ ID NO: 104, SEQ ID NO: 105, SEQ ID NO: 106, SEQ ID NO: 107, SEQ ID NO: 108, SEQ ID NO: 109, SEQ ID NO: 110, SEQ ID NO: 111, SEQ ID NO: 112, SEQ ID NO: 113, SEQ ID NO: 114, SEQ ID NO: 115, SEQ ID NO: 116, SEQ ID NO: 117, SEQ ID NO: 118, SEQ ID NO: 119, SEQ ID NO: 120, SEQ ID NO: 121, SEQ ID NO: 122, SEQ ID NO: 123, SEQ ID NO: 124, SEQ ID NO: 125, SEQ ID NO: 126, SEQ ID NO: 127, SEQ ID NO: 128, SEQ ID NO: 129, SEQ ID NO: 130, SEQ ID NO: 131, SEQ ID NO: 132, SEQ ID NO: 133, SEQ ID NO: 134, SEQ ID NO: 135, SEQ ID NO: 136, SEQ ID NO: 137, SEQ ID NO: 138, SEQ ID NO: 139, SEQ ID NO: 140, SEQ ID NO: 141, SEQ ID NO: 142, SEQ ID NO: 143, SEQ ID NO: 144, SEQ ID NO: 145, SEQ ID NO: 146, SEQ ID NO: 147, SEQ ID NO: 148, SEQ ID NO: 149, SEQ ID NO: 150, SEQ ID NO: 151, SEQ ID NO: 152, SEQ ID NO: 153, SEQ ID NO: 154, SEQ ID NO: 155, SEQ ID NO: 156, SEQ ID NO: 157, SEQ ID NO: 158, SEQ ID NO: 159, SEQ ID NO: 160, SEQ ID NO: 161, SEQ ID NO: 162, SEQ ID NO: 163, SEQ ID NO: 164, SEQ ID NO: 165, SEQ ID NO: 166, SEQ ID NO: 167, SEQ ID NO: 168, SEQ ID NO: 169, SEQ ID NO: 170, SEQ ID NO: 171, SEQ ID NO: 172, SEQ ID NO: 173, SEQ ID NO: 174, SEQ ID NO: 175, SEQ ID NO: 176, SEQ ID NO: 177, SEQ ID NO: 178, SEQ ID NO: 179, SEQ ID NO: 180, SEQ ID NO: 181, SEQ ID NO: 182, SEQ ID NO: 183, SEQ ID NO: 184, SEQ ID NO: 185, SEQ ID NO: 186, SEQ ID NO: 187, SEQ ID NO: 188, SEQ ID NO: 189, SEQ ID NO: 190, SEQ ID NO: 191, SEQ ID NO: 192, SEQ ID NO: 193, SEQ ID NO: 194, SEQ ID NO: 195, SEQ ID NO: 196, SEQ ID NO: 197, SEQ ID NO: 198, SEQ ID NO: 199, SEQ ID NO: 200, SEQ ID NO: 201, SEQ ID NO: 202, SEQ ID NO: 203, SEQ ID NO: 204, SEQ ID NO: 205, SEQ ID NO: 206, SEQ ID NO: 207, SEQ ID NO: 208, SEQ ID NO: 209, SEQ ID NO: 210, SEQ ID NO: 211, SEQ ID NO: 212, SEQ ID NO: 213, SEQ ID NO: 214, SEQ ID NO: 215, SEQ ID NO: 216, SEQ ID NO: 217, SEQ ID NO: 218, SEQ ID NO: 219, SEQ ID NO: 220, SEQ ID NO: 221, SEQ ID NO: 222, SEQ ID NO: 223, SEQ ID NO: 224, SEQ ID NO: 225, SEQ ID NO: 226, SEQ ID NO: 227, SEQ ID NO: 228, SEQ ID NO: 229, SEQ ID NO: 230, SEQ ID NO: 231, SEQ ID NO: 232, SEQ ID NO: 233, SEQ ID NO: 234, SEQ ID NO: 235, SEQ ID NO: 236, SEQ ID NO: 237, SEQ ID NO: 238, SEQ ID NO: 239, SEQ ID NO: 240, SEQ ID NO: 241, SEQ ID NO: 242, SEQ ID NO: 243, SEQ ID NO: 244, SEQ ID NO: 245, SEQ ID NO: 246, SEQ ID NO: 247, SEQ ID NO: 248, SEQ ID NO: 249, SEQ ID NO: 250, SEQ ID NO: 251, SEQ ID NO: 252, SEQ ID NO: 253, SEQ ID NO: 254, SEQ ID NO: 255, SEQ ID NO: 256, SEQ ID NO: 257, SEQ ID NO: 258, SEQ ID NO: 259, SEQ ID NO: 260, SEQ ID NO: 261, SEQ ID NO: 262, SEQ ID NO: 263, SEQ ID NO: 325, SEQ ID NO: 674, SEQ ID NO: 1869, SEQ ID NO: 1870, SEQ ID NO: 1871, SEQ ID NO: 1872, SEQ ID NO: 1873, SEQ ID NO: 1874, SEQ ID NO: 1875, or SEQ ID NO: 1876.

9. The base-editing system of claim 7, wherein the Cas9 domain comprises SEQ ID NO: 10, SEQ ID NO: 11, SEQ ID NO: 12, SEQ ID NO: 13, SEQ ID NO: 14, SEQ ID NO: 15, SEQ ID NO: 16, SEQ ID NO: 17, SEQ ID NO: 18, SEQ ID NO: 19, SEQ ID NO: 20, SEQ ID NO: 21, SEQ ID NO: 22, SEQ ID NO: 23, SEQ ID NO: 24, SEQ ID NO: 25, SEQ ID NO: 26, SEQ ID NO: 27, SEQ ID NO: 28, SEQ ID NO: 29, SEQ ID NO: 30, SEQ ID NO: 31, SEQ ID NO: 32, SEQ ID NO: 33, SEQ ID NO: 34, SEQ ID NO: 35, SEQ ID NO: 36, SEQ ID NO: 37, SEQ ID NO: 38, SEQ ID NO: 39, SEQ ID NO: 40, SEQ ID NO: 41, SEQ ID NO: 42, SEQ ID NO: 43, SEQ ID NO: 44, SEQ ID NO: 45, SEQ ID NO: 46, SEQ ID NO: 47, SEQ ID NO: 48, SEQ ID NO: 49, SEQ ID NO: 50, SEQ ID NO: 51, SEQ ID NO: 52, SEQ ID NO: 53, SEQ ID NO: 54, SEQ ID NO: 55, SEQ ID NO: 56, SEQ ID NO: 57, SEQ ID NO: 58, SEQ ID NO: 59, SEQ ID NO: 60, SEQ ID NO: 61, SEQ ID NO: 62, SEQ ID NO: 63, SEQ ID NO: 64, SEQ ID NO: 65, SEQ ID NO: 66, SEQ ID NO: 67, SEQ ID NO: 68, SEQ ID NO: 69, SEQ ID NO: 70, SEQ ID NO: 71, SEQ ID NO: 72, SEQ ID NO: 73, SEQ ID NO: 74, SEQ ID NO: 75, SEQ ID NO: 76, SEQ ID NO: 77, SEQ ID NO: 78, SEQ ID NO: 79, SEQ ID NO: 80, SEQ ID NO: 81, SEQ ID NO: 82, SEQ ID NO: 83, SEQ ID NO: 84, SEQ ID NO: 85, SEQ ID NO: 86, SEQ ID NO: 87, SEQ ID NO: 88, SEQ ID NO: 89, SEQ ID NO: 90, SEQ ID NO: 91, SEQ ID NO: 92, SEQ ID NO: 93, SEQ ID NO: 94, SEQ ID NO: 95, SEQ ID NO: 96, SEQ ID NO: 97, SEQ ID NO: 98, SEQ ID NO: 99, SEQ ID NO: 100, SEQ ID NO: 101, SEQ ID NO: 102, SEQ ID NO: 103, SEQ ID NO: 104, SEQ ID NO: 105, SEQ ID NO: 106, SEQ ID NO: 107, SEQ ID NO: 108, SEQ ID NO: 109, SEQ ID NO: 110, SEQ ID NO: 111, SEQ ID NO: 112, SEQ ID NO: 113, SEQ ID NO: 114, SEQ ID NO: 115, SEQ ID NO: 116, SEQ ID NO: 117, SEQ ID NO: 118, SEQ ID NO: 119, SEQ ID NO: 120, SEQ ID NO: 121, SEQ ID NO: 122, SEQ ID NO: 123, SEQ ID NO: 124, SEQ ID NO: 125, SEQ ID NO: 126, SEQ ID NO: 127, SEQ ID NO: 128, SEQ ID NO: 129, SEQ ID NO: 130, SEQ ID NO: 131, SEQ ID NO: 132, SEQ ID NO: 133, SEQ ID NO: 134, SEQ ID NO: 135, SEQ ID NO: 136, SEQ ID NO: 137, SEQ ID NO: 138, SEQ ID NO: 139, SEQ ID NO: 140, SEQ ID NO: 141, SEQ ID NO: 142, SEQ ID NO: 143, SEQ ID NO: 144, SEQ ID NO: 145, SEQ ID NO: 146, SEQ ID NO: 147, SEQ ID NO: 148, SEQ ID NO: 149, SEQ ID NO: 150, SEQ ID NO: 151, SEQ ID NO: 152, SEQ ID NO: 153, SEQ ID NO: 154, SEQ ID NO: 155, SEQ ID NO: 156, SEQ ID NO: 157, SEQ ID NO: 158, SEQ ID NO: 159, SEQ ID NO: 160, SEQ ID NO: 161, SEQ ID NO: 162, SEQ ID NO: 163, SEQ ID NO: 164, SEQ ID NO: 165, SEQ ID NO: 166, SEQ ID NO: 167, SEQ ID NO: 168, SEQ ID NO: 169, SEQ ID NO: 170, SEQ ID NO: 171, SEQ ID NO: 172, SEQ ID NO: 173, SEQ ID NO: 174, SEQ ID NO: 175, SEQ ID NO: 176, SEQ ID NO: 177, SEQ ID NO: 178, SEQ ID NO: 179, SEQ ID NO: 180, SEQ ID NO: 181, SEQ ID NO: 182, SEQ ID NO: 183, SEQ ID NO: 184, SEQ ID NO: 185, SEQ ID NO: 186, SEQ ID NO: 187, SEQ ID NO: 188, SEQ ID NO: 189, SEQ ID NO: 190, SEQ ID NO: 191, SEQ ID NO: 192, SEQ ID NO: 193, SEQ ID NO: 194, SEQ ID NO: 195, SEQ ID NO: 196, SEQ ID NO: 197, SEQ ID NO: 198, SEQ ID NO: 199, SEQ ID NO: 200, SEQ ID NO: 201, SEQ ID NO: 202, SEQ ID NO: 203, SEQ ID NO: 204, SEQ ID NO: 205, SEQ ID NO: 206, SEQ ID NO: 207, SEQ ID NO: 208, SEQ ID NO: 209, SEQ ID NO: 210, SEQ ID NO: 211, SEQ ID NO: 212, SEQ ID NO: 213, SEQ ID NO: 214, SEQ ID NO: 215, SEQ ID NO: 216, SEQ ID NO: 217, SEQ ID NO: 218, SEQ ID NO: 219, SEQ ID NO: 220, SEQ ID NO: 221, SEQ ID NO: 222, SEQ ID NO: 223, SEQ ID NO: 224, SEQ ID NO: 225, SEQ ID NO: 226, SEQ ID NO: 227, SEQ ID NO: 228, SEQ ID NO: 229, SEQ ID NO: 230, SEQ ID NO: 231, SEQ ID NO: 232, SEQ ID NO: 233, SEQ ID NO: 234, SEQ ID NO: 235, SEQ ID NO: 236, SEQ ID NO: 237, SEQ ID NO: 238, SEQ ID NO: 239, SEQ ID NO: 240, SEQ ID NO: 241, SEQ ID NO: 242, SEQ ID NO: 243, SEQ ID NO: 244, SEQ ID NO: 245, SEQ ID NO: 246, SEQ ID NO: 247, SEQ ID NO: 248, SEQ ID NO: 249, SEQ ID NO: 250, SEQ ID NO: 251, SEQ ID NO: 252, SEQ ID NO: 253, SEQ ID NO: 254, SEQ ID NO: 255, SEQ ID NO: 256, SEQ ID NO: 257, SEQ ID NO: 258, SEQ ID NO: 259, SEQ ID NO: 260, SEQ ID NO: 261, SEQ ID NO: 262, SEQ ID NO: 263, SEQ ID NO: 325, SEQ ID NO: 674, SEQ ID NO: 1869, SEQ ID NO: 1870, SEQ ID NO: 1871, SEQ ID NO: 1872, SEQ ID NO: 1873, SEQ ID NO: 1874, SEQ ID NO: 1875, or SEQ ID NO: 1876.

10. The base-editing system of any one of claims 3-9, wherein the Cas domain is selected from the group consisting of a Cas nickase domain and a deactivated Cas domain.

11. The base-editing system of any one of claims 1-10, wherein the base-editing system further comprises a guide RNA, wherein the guide RNA has a length in the range of 15-100 nucleotides, and wherein the guide RNA comprises a sequence of at least 10 contiguous nucleotides that is complementary to a target sequence.

12. The base-editing system of claim 1 or claim 2, wherein the DNA-binding domain is a TALE domain.

13. The base-editing system of claim 1 or claim 2 wherein the DNA-binding domain is a ZF domain.

14. The base-editing system of any one of claims 1-13, wherein the cytidine deaminase domain is an apolipoprotein B mRNA-editing complex (APOBEC) family deaminase domain.

15. The base-editing system of claim 14, wherein the APOBEC family deaminase domain is selected from the group consisting of an APOBEC1 deaminase domain, an APOBEC2 deaminase domain, an APOBEC3A deaminase domain, an APOBEC3B deaminase domain, an APOBEC3C deaminase domain, an APOBEC3D deaminase domain, an APOBEC3F deaminase domain, an APOBEC3G deaminase domain, an APOBEC3H deaminase domain, and an APOBEC4 deaminase domain.

16. The base-editing system of any one of claims 14-15, wherein the APOBEC family deaminase domain comprises an amino acid sequence with at least 85% sequence identity, at least 90% sequence identity, at least 95% sequence identity, or at least 99% sequence identity to SEQ ID NO: 266, SEQ ID NO: 267, SEQ ID NO: 268, SEQ ID NO: 269, SEQ ID NO: 270, SEQ ID NO: 271, SEQ ID NO: 272, SEQ ID NO: 273, SEQ ID NO: 274, SEQ ID NO: 275, SEQ ID NO: 276, SEQ ID NO: 277, SEQ ID NO: 278, SEQ ID NO: 279, SEQ ID NO: 280, SEQ ID NO: 281, SEQ ID NO: 282, SEQ ID NO: 283, SEQ ID NO: 284, SEQ ID NO: 607, SEQ ID NO: 608, SEQ ID NO: 609, SEQ ID NO: 610, SEQ ID NO: 1878, SEQ ID NO: 1879, SEQ ID NO: 1880, SEQ ID NO: 1881, SEQ ID NO: 1882, SEQ ID NO: 1883, SEQ ID NO: 1884, SEQ ID NO: 1885, SEQ ID NO: 1886, SEQ ID NO: 1887, SEQ ID NO: 1888, SEQ ID NO: 1889, SEQ ID NO: 1890, SEQ ID NO: 1891, SEQ ID NO: 1892, SEQ ID NO: 1893, or SEQ ID NO: 1894.

17. The base-editing system of any one of claims 14-15, wherein the APOBEC family deaminase domain comprises SEQ ID NO: 266, SEQ ID NO: 267, SEQ ID NO: 268, SEQ ID NO: 269, SEQ ID NO: 270, SEQ ID NO: 271, SEQ ID NO: 272, SEQ ID NO: 273, SEQ ID NO: 274, SEQ ID NO: 275, SEQ ID NO: 276, SEQ ID NO: 277, SEQ ID NO: 278, SEQ ID NO: 279, SEQ ID NO: 280, SEQ ID NO: 281, SEQ ID NO: 282, SEQ ID NO: 283, SEQ ID NO: 284, SEQ ID NO: 607, SEQ ID NO: 608, SEQ ID NO: 609, SEQ ID NO: 610, SEQ ID NO: 1878, SEQ ID NO: 1879, SEQ ID NO: 1880, SEQ ID NO: 1881, SEQ ID NO: 1882, SEQ ID NO: 1883, SEQ ID NO: 1884, SEQ ID NO: 1885, SEQ ID NO: 1886, SEQ ID NO: 1887, SEQ ID NO: 1888, SEQ ID NO: 1889, SEQ ID NO: 1890, SEQ ID NO: 1891, SEQ ID NO: 1892, SEQ ID NO: 1893, or SEQ ID NO: 1894.

18. The base-editing system of any one of claims 14-17, wherein the APOBEC family deaminase domain is an activation-induced deaminase (AID) domain.

19. The base-editing system of any one of claims 1-18, wherein the small molecule inhibitor of UDG is a compound of formula (I): [chemical structure]
or a pharmaceutically acceptable salt thereof, wherein:
R¹ is H, a furanose carbohydrate, a pyranose carbohydrate, a carbohydrate mimetic, C₁₋₁₆alkyl, C₁₋₁₆alkenyl, C₁₋₁₆alkynyl, C₁₋₁₆alkoxy, or C₆₋₂₀aryl, wherein the furanose carbohydrate, or a derivative thereof, pyranose carbohydrate, or a derivative thereof, carbohydrate mimetic, C₁₋₁₆alkyl, C₁₋₁₆alkenyl, C₁₋₁₆alkynyl, C₁₋₁₆alkoxy, or C₆₋₂₀aryl is independently optionally substituted with one or more substituents selected from the group consisting of hydroxyl, halo, cyano, NO₂, N(R⁴)(R⁵), C₁₋₁₆alkoxy, and C₆₋₂₀aryl, wherein the C₆₋₂₀aryl is further optionally substituted with one or more substituents selected from the group consisting of C₁₋₁₆alkyl, C₁₋₁₆alkenyl, C₁₋₁₆alkynyl, C₁₋₁₆alkoxy, hydroxyl, halo, cyano, NO₂, and N(R⁴)(R⁵);
L is O, S, or *—N(R³)—**, wherein R³ is H or C₁₋₁₆alkyl, and ** indicates the point of attachment to the R² moiety and * indicates the point of attachment to the remainder of the molecule;
R² is H, N(R⁴)(R⁵), or C₆₋₂₀aryl, wherein the C₆₋₂₀aryl is independently substituted with one or more substituents selected from the group consisting of C₁₋₁₆alkyl, C₁₋₁₆alkenyl, C₁₋₁₆alkynyl, and C₁₋₁₆alkoxy; and
R⁴ and R⁵ are each independently H or C₆₋₂₀aryl; and
R⁶ is H or halo.

20. The base-editing system of claim 19, wherein R¹ is H.

21. The base-editing system of claim 19, wherein R¹ is C₁₋₁₆alkyl, wherein the C₁₋₁₆alkyl is optionally substituted with one or more substituents selected from the group consisting of hydroxyl, halo, cyano, NO₂, N(R⁴)(R⁵), C₁₋₁₆alkoxy, and C₆₋₂₀aryl, wherein the C₆₋₂₀aryl is further optionally substituted with one or more substituents selected from the group consisting of C₁₋₁₆alkyl, C₁₋₁₆alkenyl, C₁₋₁₆alkynyl, C₁₋₁₆alkoxy, hydroxyl, halo, cyano, NO₂, and N(R⁴)(R⁵), wherein R₄ and R₅ are each independently H or C₆₋₂₀aryl.

22. The base-editing system of any one of claims 19-21, wherein L is NR³, wherein R³ is H.

23. The base-editing system of any one of claims 19-21, wherein L is O.

24. The base-editing system of any one of claims 19-23, wherein R² is C₆₋₂₀aryl, wherein the C₆₋₂₀aryl is independently substituted with one or more substituents selected from the group consisting of C₁₋₁₆alkyl, C₁₋₁₆alkenyl, C₁₋₁₆alkynyl, and C₁₋₁₆alkoxy.

25. The base-editing system of any one of claims 19-24, wherein R⁶ is H.

26. The base-editing system of any one of claims 19-24, wherein R⁶ is halo.

27. The base-editing system of any one of claims 19-26, further comprising a pharmaceutically acceptable carrier, diluent, or excipient.

28. The base-editing system of any one of claims 19-27, wherein the compound of formula (I) is incorporated into a macromolecule.

29. The base-editing system of claim 28, wherein the macromolecule is an oligonucleotide.

30. The base-editing system of any one of claims 1-29, wherein the npUGI reversibly inhibits an activity of an UDG.

31. The base-editing system of any one of claims 1-30, wherein the UDG is an animal UDG.

32. The base-editing system of any one of claims 1-30, wherein the UDG is a plant UDG.

33. The base-editing system of claim 32, wherein the plant UDG comprises an amino acid sequence with at least 85% sequence identity, at least 90% sequence identity, at least 95% sequence identity, or at least 99% sequence identity to SEQ ID NO: 373, SEQ ID NO: 374, SEQ ID NO: 375, SEQ ID NO: 376, SEQ ID NO: 377, SEQ ID NO: 378, or SEQ ID NO: 379.

34. The base-editing system of any one of claims 32-33, wherein the plant UDG comprises SEQ ID NO: 373, SEQ ID NO: 374, SEQ ID NO: 375, SEQ ID NO: 376, SEQ ID NO: 377, SEQ ID NO: 378, or SEQ ID NO: 379.

35. The base-editing system of any one of claims 1-34, wherein the fusion protein and the npUGI are chemically linked.

36. The base-editing system of any one of claims 1-34, wherein the fusion protein and the npUGI are not chemically linked.

37. A base-editing system comprising (i) a fusion protein comprising (a) a Cas9 nickase domain or a dCas9 domain and (b) an APOBEC family deaminase domain; and (ii) a npUGI.

38. A base-editing system comprising (i) a fusion protein comprising (a) a Cas12a nickase domain or a dCas12a domain and (b) an APOBEC family deaminase domain; and (ii) a npUGI.

39. A base-editing system comprising (i) a fusion protein comprising (a) a TALE domain and (b) an APOBEC family deaminase domain; and (ii) a npUGI.

40. A base-editing system comprising (i) a fusion protein comprising (a) a ZF domain and (b) an APOBEC family deaminase domain; and (ii) a npUGI.

41. The base-editing system of any one of claims 37-40, wherein the npUGI is selected from the group consisting of a small molecule inhibitor of uracil-DNA glycosylase (UDG) and a nucleic acid inhibitor of UDG.

42. The base-editing system of any one of claims 37-38 and 41, wherein the npUGI is a RNA guide of the Cas9 nickase domain, the dCas9 domain, the Cas12a nickase domain, or the dCas12a domain, wherein the RNA guide comprises a 5′ end and a 3′ end, and wherein the RNA guide comprises one or more deoxyuracil (dU) bases added to the 5′ end or the 3′ end.

43. A method of editing a target nucleic acid molecule, comprising contacting a target nucleic acid molecule with the base-editing system of claim 3, wherein the DNA binding domain of the fusion protein is the Cas domain.

44. A method of editing a target nucleic acid molecule, comprising contacting a target nucleic acid molecule with the base-editing system of claim 2, wherein the DNA binding domain of the fusion protein is the TALE domain or the ZF domain.

45. The method of claim 43 or claim 44, wherein the fusion protein and the npUGI of the base-editing system are chemically linked.

46. The method of any one of claims 43-45, wherein the fusion protein and the npUGI are chemically linked by in vitro complexing.

47. The method of claim 43 or claim 44, wherein the fusion protein and the npUGI of the base-editing system are not chemically linked.

48. The method of any one of claims 43-47, wherein the fusion protein and the npUGI are co-delivered, wherein the fusion protein is delivered before the npUGI, or wherein the npUGI is delivered before the fusion protein.

49. The method of any one of claims 43-48, wherein the target nucleic acid sequence is a double-stranded DNA (dsDNA) sequence, and wherein the target nucleic acid sequence is in the genome of an organism.

50. The method of any one of claims 43-49, wherein the target nucleic acid sequence is associated with a disease or disorder, and wherein the target nucleic acid sequence comprises a point mutation.

51. The method of claim 50, wherein the point mutation is a T to C point mutation, and wherein the T to C point mutation is associated with the disease or disorder.

52. The method of claim 50 or claim 51, wherein the point mutation is a T to C point mutation in a codon of the target nucleic acid sequence, and wherein the point mutation results in an amino acid change in a polypeptide encoded by the target nucleic acid sequence as compared to a wild-type polypeptide encoded by a wild-type nucleic acid sequence without the point mutation.

53. The method of any one of claims 50-52, wherein contacting the target nucleic acid sequence with the base-editing system produces a nucleic acid sequence that is not associated with the disease or disorder.

54. The method of any one of claims 50-53, wherein contacting the target nucleic acid sequence with the base-editing system produces a wild-type nucleic acid sequence without the point mutation.

55. The method of any one of claims 50-54, wherein the disease or disorder is cystic fibrosis, phenylketonuria, epidermolytic hyperkeratosis (EHK), Charcot-Marie-Toot disease type 4J, neuroblastoma (NB), von Willebrand disease (vWD), myotonia congenital, hereditary renal amyloidosis, dilated cardiomyopathy (DCM), hereditary lymphedema, familial Alzheimer's disease, HIV, Prion disease, chronic infantile neurologic cutaneous articular syndrome (CINCA), desmin-related myopathy (DRM), a neoplastic disease associated with a mutant PI3KCA protein, a mutant CTNNBl protein, a mutant HRAS protein, or a mutant p53 protein.

56. The method of any one of claims 43-55, wherein the contacting is performed in vivo.

57. The method of any one of claims 43-55, wherein the contacting is performed in vitro.

58. The method of any one of claims 49-57, wherein the organism is a mammal, and wherein the mammal is selected from the group consisting of mouse, rat, human, pig, cow, chicken, rhesus monkey, and guinea pig.

59. The method of any one of claims 49-50, wherein the target nucleic acid sequence is selected from the group consisting of a target nucleic acid sequence associated with a disease, a target nucleic acid sequence associated with a disorder, a target nucleic acid sequence associated with metabolic function, a target nucleic acid sequence associated with reproductive function, a target nucleic acid sequence associated with disease resistance function, a target nucleic acid sequence associated with stress tolerance function, a target nucleic acid sequence associated with agronomic function, and a target nucleic acid sequence associated with nutritional function.

60. The method of any one of claims 49-51, wherein contacting the target nucleic acid sequence with the base-editing system produces a nucleic acid sequence selected from the group consisting of a nucleic acid sequence with a corrected deleterious mutation, a nucleic acid sequence derivative, a modified nucleic acid sequence, a nucleic acid sequence with an inserted sequence, a nucleic acid sequence with improved function, and a nucleic acid sequence with altered function.

61. The method of any one of claims 49-52, wherein the target nucleic acid sequence comprises a point mutation, and wherein contacting the target nucleic acid sequence with the base-editing system produces a wild-type nucleic acid sequence without the point mutation.

62. The method of any one of claims 59-61, wherein the contacting is performed in vivo.

63. The method of any one of claims 59-61, wherein the contacting is performed in vitro.

64. The method of any one of claims 59-63, wherein the organism is a plant, and wherein the plant is selected from the group consisting of sorghum, corn, tomato, rice, soybean, and wheat.

65. A method for in vivo editing of a cytosine residue of a target DNA sequence, the method comprising
a. contacting the target DNA sequence with the base-editing system of any one of claims 3-11 and 37-38, wherein the DNA binding domain of the fusion protein is the Cas domain, and a guide nucleic acid; and
b. cultivating the cell through a cell division.

66. A method for editing a nucleobase pair of a double-stranded DNA sequence, the method comprising:
a. contacting a target region of the double-stranded DNA sequence with the base-editing system of any one of claims 3-11 and 37-38, wherein the DNA binding domain of the fusion protein is the Cas domain, and a guide nucleic acid, wherein the target region comprises a target nucleobase pair;
b. inducing strand separation of said target region;
c. converting a first nucleobase of said target nucleobase pair in a single strand of the target region to a second nucleobase; and
d. cutting no more than one strand of said target region;
wherein a third nucleobase complementary to the first nucleobase base is replaced by a fourth nucleobase complementary to the second nucleobase and the method causes less than 20% indel formation in the double-stranded DNA sequence.

67. The method of claim 65 or claim 66, wherein the cut single strand is hybridized to the guide nucleic acid.

68. The method of any one of claims 65-67, wherein the cut single strand is opposite to the strand comprising the first nucleobase.

69. The method of any one of claims 66-68, wherein the first base is a cytosine.

70. The method of any one of claims 66-69, wherein the second base is an uracil.

71. The method of any one of claims 66-70, wherein the Cas domain is selected from the group consisting of a Cas nickase domain and a deactivated Cas domain.

72. A method for editing a nucleobase pair of a double-stranded DNA sequence, the method comprising:
a. contacting a target region of the double-stranded DNA sequence with the base-editing system of claim 3, wherein the DNA binding domain of the fusion protein is the Cas domain, and a guide nucleic acid, wherein the target region comprises a target nucleobase pair;
b. inducing strand separation of said target region;
c. converting a first nucleobase of said target nucleobase pair in a single strand of the target region to a second nucleobase;
d. cutting no more than one strand of said target region; wherein a third nucleobase complementary to the first nucleobase base is replaced by a fourth nucleobase complementary to the second nucleobase; and
e. replacing the second nucleobase with a fifth nucleobase that is complementary to the fourth nucleobase, thereby generating an intended edited basepair, wherein the efficiency of generating the intended edited basepair is at least 5%.

73. The method of claim 72, wherein the cut single strand is hybridized to the guide nucleic acid.

74. The method of claim 72 or claim 73, wherein the cut single strand is opposite to the strand comprising the first nucleobase.

75. The method of any one of claims 72-74, wherein the first base is a cytosine.

76. The method of any one of claims 72-75, wherein the second base is an uracil.

77. The method of any one of claims 72-76, wherein the Cas domain is selected from the group consisting of a Cas nickase domain and a deactivated Cas domain.

78. The method of any one of claims 72-77, wherein the Cas domain is selected from the group consisting of a Cas 9 domain, a Cas12a domain, a Cas12h domain, a Cas12i domain, a CasX domain, a CasY domain, a C2c1 domain, a C2c2 domain, and a C2c3 domain

79. The method of any one of claims 72-78, wherein the Cas domain is the Cas12a domain, and wherein the Cas12a domain comprises an amino acid sequence with at least 85% sequence identity, at least 90% sequence identity, at least 95% sequence identity, or at least 99% sequence identity to SEQ ID NO: 350, SEQ ID NO: 351, SEQ ID NO: 352, SEQ ID NO: 353, SEQ ID NO: 354, SEQ ID NO: 355, SEQ ID NO: 356, SEQ ID NO: 357, SEQ ID NO: 358, SEQ ID NO: 359, SEQ ID NO: 360, SEQ ID NO: 361, SEQ ID NO: 362, SEQ ID NO: 363, SEQ ID NO: 364, SEQ ID NO: 365, SEQ ID NO: 390, SEQ ID NO: 391, SEQ ID NO: 392, SEQ ID NO: 393, SEQ ID NO: 394, SEQ ID NO: 395, SEQ ID NO: 396, SEQ ID NO: 397, SEQ ID NO: 398, SEQ ID NO: 399, SEQ ID NO: 400, SEQ ID NO: 401, SEQ ID NO: 403, SEQ ID NO: 404, SEQ ID NO: 405, SEQ ID NO: 406, SEQ ID NO: 407, SEQ ID NO: 408, SEQ ID NO: 409, SEQ ID NO: 410, SEQ ID NO: 411, SEQ ID NO: 412, or SEQ ID NO: 413.

80. The method of any one of claims 72-79, wherein the Cas domain is the Cas9 domain, and wherein the Cas9 domain comprises an amino acid sequence with at least 85% sequence identity, at least 90% sequence identity, at least 95% sequence identity, or at least 99% sequence identity to SEQ ID NO: 10, SEQ ID NO: 11, SEQ ID NO: 12, SEQ ID NO: 13, SEQ ID NO: 14, SEQ ID NO: 15, SEQ ID NO: 16, SEQ ID NO: 17, SEQ ID NO: 18, SEQ ID NO: 19, SEQ ID NO: 20, SEQ ID NO: 21, SEQ ID NO: 22, SEQ ID NO: 23, SEQ ID NO: 24, SEQ ID NO: 25, SEQ ID NO: 26, SEQ ID NO: 27, SEQ ID NO: 28, SEQ ID NO: 29, SEQ ID NO: 30, SEQ ID NO: 31, SEQ ID NO: 32, SEQ ID NO: 33, SEQ ID NO: 34, SEQ ID NO: 35, SEQ ID NO: 36, SEQ ID NO: 37, SEQ ID NO: 38, SEQ ID NO: 39, SEQ ID NO: 40, SEQ ID NO: 41, SEQ ID NO: 42, SEQ ID NO: 43, SEQ ID NO: 44, SEQ ID NO: 45, SEQ ID NO: 46, SEQ ID NO: 47, SEQ ID NO: 48, SEQ ID NO: 49, SEQ ID NO: 50, SEQ ID NO: 51, SEQ ID NO: 52, SEQ ID NO: 53, SEQ ID NO: 54, SEQ ID NO: 55, SEQ ID NO: 56, SEQ ID NO: 57, SEQ ID NO: 58, SEQ ID NO: 59, SEQ ID NO: 60, SEQ ID NO: 61, SEQ ID NO: 62, SEQ ID NO: 63, SEQ ID NO: 64, SEQ ID NO: 65, SEQ ID NO: 66, SEQ ID NO: 67, SEQ ID NO: 68, SEQ ID NO: 69, SEQ ID NO: 70, SEQ ID NO: 71, SEQ ID NO: 72, SEQ ID NO: 73, SEQ ID NO: 74, SEQ ID NO: 75, SEQ ID NO: 76, SEQ ID NO: 77, SEQ ID NO: 78, SEQ ID NO: 79, SEQ ID NO: 80, SEQ ID NO: 81, SEQ ID NO: 82, SEQ ID NO: 83, SEQ ID NO: 84, SEQ ID NO: 85, SEQ ID NO: 86, SEQ ID NO: 87, SEQ ID NO: 88, SEQ ID NO: 89, SEQ ID NO: 90, SEQ ID NO: 91, SEQ ID NO: 92, SEQ ID NO: 93, SEQ ID NO: 94, SEQ ID NO: 95, SEQ ID NO: 96, SEQ ID NO: 97, SEQ ID NO: 98, SEQ ID NO: 99, SEQ ID NO: 100, SEQ ID NO: 101, SEQ ID NO: 102, SEQ ID NO: 103, SEQ ID NO: 104, SEQ ID NO: 105, SEQ ID NO: 106, SEQ ID NO: 107, SEQ ID NO: 108, SEQ ID NO: 109, SEQ ID NO: 110, SEQ ID NO: 111, SEQ ID NO: 112, SEQ ID NO: 113, SEQ ID NO: 114, SEQ ID NO: 115, SEQ ID NO: 116, SEQ ID NO: 117, SEQ ID NO: 118, SEQ ID NO: 119, SEQ ID NO: 120, SEQ ID NO: 121, SEQ ID NO: 122, SEQ ID NO: 123, SEQ ID NO: 124, SEQ ID NO: 125, SEQ ID NO: 126, SEQ ID NO: 127, SEQ ID NO: 128, SEQ ID NO: 129, SEQ ID NO: 130, SEQ ID NO: 131, SEQ ID NO: 132, SEQ ID NO: 133, SEQ ID NO: 134, SEQ ID NO: 135, SEQ ID NO: 136, SEQ ID NO: 137, SEQ ID NO: 138, SEQ ID NO: 139, SEQ ID NO: 140, SEQ ID NO: 141, SEQ ID NO: 142, SEQ ID NO: 143, SEQ ID NO: 144, SEQ ID NO: 145, SEQ ID NO: 146, SEQ ID NO: 147, SEQ ID NO: 148, SEQ ID NO: 149, SEQ ID NO: 150, SEQ ID NO: 151, SEQ ID NO: 152, SEQ ID NO: 153, SEQ ID NO: 154, SEQ ID NO: 155, SEQ ID NO: 156, SEQ ID NO: 157, SEQ ID NO: 158, SEQ ID NO: 159, SEQ ID NO: 160, SEQ ID NO: 161, SEQ ID NO: 162, SEQ ID NO: 163, SEQ ID NO: 164, SEQ ID NO: 165, SEQ ID NO: 166, SEQ ID NO: 167, SEQ ID NO: 168, SEQ ID NO: 169, SEQ ID NO: 170, SEQ ID NO: 171, SEQ ID NO: 172, SEQ ID NO: 173, SEQ ID NO: 174, SEQ ID NO: 175, SEQ ID NO: 176, SEQ ID NO: 177, SEQ ID NO: 178, SEQ ID NO: 179, SEQ ID NO: 180, SEQ ID NO: 181, SEQ ID NO: 182, SEQ ID NO: 183, SEQ ID NO: 184, SEQ ID NO: 185, SEQ ID NO: 186, SEQ ID NO: 187, SEQ ID NO: 188, SEQ ID NO: 189, SEQ ID NO: 190, SEQ ID NO: 191, SEQ ID NO: 192, SEQ ID NO: 193, SEQ ID NO: 194, SEQ ID NO: 195, SEQ ID NO: 196, SEQ ID NO: 197, SEQ ID NO: 198, SEQ ID NO: 199, SEQ ID NO: 200, SEQ ID NO: 201, SEQ ID NO: 202, SEQ ID NO: 203, SEQ ID NO: 204, SEQ ID NO: 205, SEQ ID NO: 206, SEQ ID NO: 207, SEQ ID NO: 208, SEQ ID NO: 209, SEQ ID NO: 210, SEQ ID NO: 211, SEQ ID NO: 212, SEQ ID NO: 213, SEQ ID NO: 214, SEQ ID NO: 215, SEQ ID NO: 216, SEQ ID NO: 217, SEQ ID NO: 218, SEQ ID NO: 219, SEQ ID NO: 220, SEQ ID NO: 221, SEQ ID NO: 222, SEQ ID NO: 223, SEQ ID NO: 224, SEQ ID NO: 225, SEQ ID NO: 226, SEQ ID NO: 227, SEQ ID NO: 228, SEQ ID NO: 229, SEQ ID NO: 230, SEQ ID NO: 231, SEQ ID NO: 232, SEQ ID NO: 233, SEQ ID NO: 234, SEQ ID NO: 235, SEQ ID NO: 236, SEQ ID NO: 237, SEQ ID NO: 238, SEQ ID NO: 239, SEQ ID NO: 240, SEQ ID NO: 241, SEQ ID NO: 242, SEQ ID NO: 243, SEQ ID NO: 244, SEQ ID NO: 245, SEQ ID NO: 246, SEQ ID NO: 247, SEQ ID NO: 248, SEQ ID NO: 249, SEQ ID NO: 250, SEQ ID NO: 251, SEQ ID NO: 252, SEQ ID NO: 253, SEQ ID NO: 254, SEQ ID NO: 255, SEQ ID NO: 256, SEQ ID NO: 257, SEQ ID NO: 258, SEQ ID NO: 259, SEQ ID NO: 260, SEQ ID NO: 261, SEQ ID NO: 262, SEQ ID NO: 263, SEQ ID NO: 325, SEQ ID NO: 674, SEQ ID NO: 1869, SEQ ID NO: 1870, SEQ ID NO: 1871, SEQ ID NO: 1872, SEQ ID NO: 1873, SEQ ID NO: 1874, SEQ ID NO: 1875, or SEQ ID NO: 1876.

81. A method for in vivo editing of a cytosine residue of a target DNA sequence, the method comprising
a. contacting the target DNA sequence with the base-editing system of any one of claims 12-13 and 39-40, wherein the DNA binding domain of the fusion protein is the TALE domain or the ZF domain; and
b. cultivating the cell through a cell division.

82. The method of any one of claims 65-81, wherein the fusion protein and the npUGI are chemically linked.

83. The method of claim 82, wherein the fusion protein and the npUGI are chemically linked by in vitro complexing or in vivo complexing.

84. The method of any one of claims 65-82, wherein the fusion protein and the npUGI are not chemically linked.

85. The method of any one of claims 65-84, wherein the fusion protein and the npUGI are co-delivered, wherein the fusion protein is delivered before the npUGI, or wherein the npUGI is delivered before the fusion protein.

86. The method of any one of claims 65-85, wherein the DNA sequence is in the genome of an organism.

87. The method of any one of claim 86, wherein the organism is a mammal selected from the group consisting of mouse, rat, human, pig, cow, chicken, rhesus monkey, and guinea pig.

88. The method of any one of claim 86, wherein the organism is a plant selected from the group consisting of sorghum, corn, tomato, rice, soybean, and wheat.

The application's sequence listing, which the Patent Office published only in electronic form, follows.

SEQUENCE LISTING (1894 sequences)

SEQ ID NO: 1 - DNA, 4104 bp, Streptococcus pyogenes
atggataagaaatactcaataggcttagatatcggcacaaatagcgtcggatgggcggtgatcactgatgattataaggttccgtctaaaaagttcaaggttctgggaaatacagaccgccacagtatcaaaaaaaatcttataggggctcttttatttggcagtggagagacagcggaagcgactcgtctcaaacggacagctcgtagaaggtatacacgtcggaagaatcgtatttgttatctacaggagattttttcaaatgagatggcgaaagtagatgatagtttctttcatcgacttgaagagtcttttttggtggaagaagacaagaagcatgaacgtcatcctatttttggaaatatagtagatgaagttgcttatcatgagaaatatccaactatctatcatctgcgaaaaaaattggcagattctactgataaagcggatttgcgcttaatctatttggccttagcgcatatgattaagtttcgtggtcattttttgattgagggagatttaaatcctgataatagtgatgtggacaaactatttatccagttggtacaaatctacaatcaattatttgaagaaaaccctattaacgcaagtagagtagatgctaaagcgattctttctgcacgattgagtaaatcaagacgattagaaaatctcattgctcagctccccggtgagaagagaaatggcttgtttgggaatctcattgctttgtcattgggattgacccctaattttaaatcaaattttgatttggcagaagatgctaaattacagctttcaaaagatacttacgatgatgatttagataatttattggcgcaaattggagatcaatatgctgatttgtttttggcagctaagaatttatcagatgctattttactttcagatatcctaagagtaaatagtgaaataactaaggctcccctatcagcttcaatgattaagcgctacgatgaacatcatcaagacttgactcttttaaaagctttagttcgacaacaacttccagaaaagtataaagaaatcttttttgatcaatcaaaaaacggatatgcaggttatattgatgggggagctagccaagaagaattttataaatttatcaaaccaattttagaaaaaatggatggtactgaggaattattggtgaaactaaatcgtgaagatttgctgcgcaagcaacggacctttgacaacggctctattccccatcaaattcacttgggtgagctgcatgctattttgagaagacaagaagacttttatccatttttaaaagacaatcgtgagaagattgaaaaaatcttgacttttcgaattccttattatgttggtccattggcgcgtggcaatagtcgttttgcatggatgactcggaagtctgaagaaacaattaccccatggaattttgaagaagttgtcgataaaggtgcttcagctcaatcatttattgaacgcatgacaaactttgataaaaatcttccaaatgaaaaagtactaccaaaacatagtttgctttatgagtattttacggtttataacgaattgacaaaggtcaaatatgttactgagggaatgcgaaaaccagcatttctttcaggtgaacagaagaaagccattgttgatttactcttcaaaacaaatcgaaaagtaaccgttaagcaattaaaagaagattatttcaaaaaaatagaatgttttgatagtgttgaaatttcaggagttgaagatagatttaatgcttcattaggcgcctaccatgatttgctaaaaattattaaagataaagattttttggataatgaagaaaatgaagatatcttagaggatattgttttaacattgaccttatttgaagatagggggatgattgaggaaagacttaaaacatatgctcacctctttgatgataaggtgatgaaacagcttaaacgtcgccgttatactggttggggacgtttgtctcgaaaattgattaatggtattagggataagcaatctggcaaaacaatattagattttttgaaatcagatggttttgccaatcgcaattttatgcagctgatccatgatgatagtttgacatttaaagaagatattcaaaaagcacaggtgtctggacaaggccatagtttacatgaacagattgctaacttagctggcagtcctgctattaaaaaaggtattttacagactgtaaaaattgttgatgaactggtcaaagtaatggggcataagccagaaaatatcgttattgaaatggcacgtgaaaatcagacaactcaaaagggccagaaaaattcgcgagagcgtatgaaacgaatcgaagaaggtatcaaagaattaggaagtcagattcttaaagagcatcctgttgaaaatactcaattgcaaaatgaaaagctctatctctattatctacaaaatggaagagacatgtatgtggaccaagaattagatattaatcgtttaagtgattatgatgtcgatcacattgttccacaaagtttcattaaagacgattcaatagacaataaggtactaacgcgttctgataaaaatcgtggtaaatcggataacgttccaagtgaagaagtagtcaaaaagatgaaaaactattggagacaacttctaaacgccaagttaatcactcaacgtaagtttgataatttaacgaaagctgaacgtggaggtttgagtgaacttgataaagctggttttatcaaacgccaattggttgaaactcgccaaatcactaagcatgtggcacaaattttggatagtcgcatgaatactaaatacgatgaaaatgataaacttattcgagaggttaaagtgattaccttaaaatctaaattagtttctgacttccgaaaagatttccaattctataaagtacgtgagattaacaattaccatcatgcccatgatgcgtatctaaatgccgtcgttggaactgctttgattaagaaatatccaaaacttgaatcggagtttgtctatggtgattataaagtttatgatgttcgtaaaatgattgctaagtctgagcaagaaataggcaaagcaaccgcaaaatatttcttttactctaatatcatgaacttcttcaaaacagaaattacacttgcaaatggagagattcgcaaacgccctctaatcgaaactaatggggaaactggagaaattgtctgggataaagggcgagattttgccacagtgcgcaaagtattgtccatgccccaagtcaatattgtcaagaaaacagaagtacagacaggcggattctccaaggagtcaattttaccaaaaagaaattcggacaagcttattgctcgtaaaaaagactgggatccaaaaaaatatggtggttttgatagtccaacggtagcttattcagtcctagtggttgctaaggtggaaaaagggaaatcgaagaagttaaaatccgttaaagagttactagggatcacaattatggaaagaagttcctttgaaaaaaatccgattgactttttagaagctaaaggatataaggaagttaaaaaagacttaatcattaaactacctaaatatagtctttttgagttagaaaacggtcgtaaacggatgctggctagtgccggagaattacaaaaaggaaatgagctggctctgccaagcaaatatgtgaattttttatatttagctagtcattatgaaaagttgaagggtagtccagaagataacgaacaaaaacaattgtttgtggagcagcataagcattatttagatgagattattgagcaaatcagtgaattttctaagcgtgttattttagcagatgccaatttagataaagttcttagtgcatataacaaacatagagacaaaccaatacgtgaacaagcagaaaatattattcatttatttacgttgacgaatcttggagctcccgctgcttttaaatattttgatacaacaattgatcgtaaacgatatacgtctacaaaagaagttttagatgccactcttatccatcaatccatcactggtctttatgaaacacgcattgatttgagtcagctaggaggtgactga

SEQ ID NO: 2 - protein, 1367 aa, Streptococcus pyogenes
MDKKYSIGLDIGTNSVGWAVITDDYKVPSKKFKVLGNTDRHSIKKNLIGALLFGSGETAEATRLKRTARRRYTRRKNRICYLQEIFSNEMAKVDDSFFHRLEESFLVEEDKKHERHPIFGNIVDEVAYHEKYPTIYHLRKKLADSTDKADLRLIYLALAHMIKFRGHFLIEGDLNPDNSDVDKLFIQLVQIYNQLFEENPINASRVDAKAILSARLSKSRRLENLIAQLPGEKRNGLFGNLIALSLGLTPNFKSNFDLAEDAKLQLSKDTYDDDLDNLLAQIGDQYADLFLAAKNLSDAILLSDILRVNSEITKAPLSASMIKRYDEHHQDLTLLKALVRQQLPEKYKEIFFDQSKNGYAGYIDGGASQEEFYKFIKPILEKMDGTEELLVKLNREDLLRKQRTFDNGSIPHQIHLGELHAILRRQEDFYPFLKDNREKIEKILTFRIPYYVGPLARGNSRFAWMTRKSEETITPWNFEEVVDKGASAQSFIERMTNFDKNLPNEKVLPKHSLLYEYFTVYNELTKVKYVTEGMRKPAFLSGEQKKAIVDLLFKTNRKVTVKQLKEDYFKKIECFDSVEISGVEDRFNASLGAYHDLLKIIKDKDFLDNEENEDILEDIVLTLTLFEDRGMIEERLKTYAHLFDDKVMKQLKRRRYTGWGRLSRKLINGIRDKQSGKTILDFLKSDGFANRNFMQLIHDDSLTFKEDIQKAQVSGQGHSLHEQIANLAGSPAIKKGILQTVKIVDELVKVMGHKPENIVIEMARENQTTQKGQKNSRERMKRIEEGIKELGSQILKEHPVENTQLQNEKLYLYYLQNGRDMYVDQELDINRLSDYDVDHIVPQSFIKDDSIDNKVLTRSDKNRGKSDNVPSEEVVKKMKNYWRQLLNAKLITQRKFDNLTKAERGGLSELDKAGFIKRQLVETRQITKHVAQILDSRMNTKYDENDKLIREVKVITLKSKLVSDFRKDFQFYKVREINNYHHAHDAYLNAVVGTALIKKYPKLESEFVYGDYKVYDVRKMIAKSEQEIGKATAKYFFYSNIMNFFKTEITLANGEIRKRPLIETNGETGEIVWDKGRDFATVRKVLSMPQVNIVKKTEVQTGGFSKESILPKRNSDKLIARKKDWDPKKYGGFDSPTVAYSVLVVAKVEKGKSKKLKSVKELLGITIMERSSFEKNPIDFLEAKGYKEVKKDLIIKLPKYSLFELENGRKRMLASAGELQKGNELALPSKYVNFLYLASHYEKLKGSPEDNEQKQLFVEQHKHYLDEIIEQISEFSKRVILADANLDKVLSAYNKHRDKPIREQAENIIHLFTLTNLGAPAAFKYFDTTIDRKRYTSTKEVLDATLIHQSITGLYETRIDLSQLGGD

SEQ ID NO: 3 - DNA, 4212 bp, Streptococcus pyogenes
atggataaaaagtattctattggtttagacatcggcactaattccgttggatgggctgtcataaccgatgaatacaaagtaccttcaaagaaatttaaggtgttggggaacacagaccgtcattcgattaaaaagaatcttatcggtgccctcctattcgatagtggcgaaacggcagaggcgactcgcctgaaacgaaccgctcggagaaggtatacacgtcgcaagaaccgaatatgttacttacaagaaatttttagcaatgagatggccaaagttgacgattctttctttcaccgtttggaagagtccttccttgtcgaagaggacaagaaacatgaacggcaccccatctttggaaacatagtagatgaggtggcatatcatgaaaagtacccaacgatttatcacctcagaaaaaagctagttgactcaactgataaagcggacctgaggttaatctacttggctcttgcccatatgataaagttccgtgggcactttctcattgagggtgatctaaatccggacaactcggatgtcgacaaactgttcatccagttagtacaaacctataatcagttgtttgaagagaaccctataaatgcaagtggcgtggatgcgaaggctattcttagcgcccgcctctctaaatcccgacggctagaaaacctgatcgcacaattacccggagagaagaaaaatgggttgttcggtaaccttatagcgctctcactaggcctgacaccaaattttaagtcgaacttcgacttagctgaagatgccaaattgcagcttagtaaggacacgtacgatgacgatctcgacaatctactggcacaaattggagatcagtatgcggacttatttttggctgccaaaaaccttagcgatgcaatcctcctatctgacatactgagagttaatactgagattaccaaggcgccgttatccgcttcaatgatcaaaaggtacgatgaacatcaccaagacttgacacttctcaaggccctagtccgtcagcaactgcctgagaaatataaggaaatattctttgatcagtcgaaaaacgggtacgcaggttatattgacggcggagcgagtcaagaggaattctacaagtttatcaaacccatattagagaagatggatgggacggaagagttgcttgtaaaactcaatcgcgaagatctactgcgaaagcagcggactttcgacaacggtagcattccacatcaaatccacttaggcgaattgcatgctatacttagaaggcaggaggatttttatccgttcctcaaagacaatcgtgaaaagattgagaaaatcctaacctttcgcataccttactatgtgggacccctggcccgagggaactctcggttcgcatggatgacaagaaagtccgaagaaacgattactccatggaattttgaggaagttgtcgataaaggtgcgtcagctcaatcgttcatcgagaggatgaccaactttgacaagaatttaccgaacgaaaaagtattgcctaagcacagtttactttacgagtatttcacagtgtacaatgaactcacgaaagttaagtatgtcactgagggcatgcgtaaacccgcctttctaagcggagaacagaagaaagcaatagtagatctgttattcaagaccaaccgcaaagtgacagttaagcaattgaaagaggactactttaagaaaattgaatgcttcgattctgtcgagatctccggggtagaagatcgatttaatgcgtcacttggtacgtatcatgacctcctaaagataattaaagataaggacttcctggataacgaagagaatgaagatatcttagaagatatagtgttgactcttaccctctttgaagatcgggaaatgattgaggaaagactaaaaacatacgctcacctgttcgacgataaggttatgaaacagttaaagaggcgtcgctatacgggctggggacgattgtcgcggaaacttatcaacgggataagagacaagcaaagtggtaaaactattctcgattttctaaagagcgacggcttcgccaataggaactttatgcagctgatccatgatgactctttaaccttcaaagaggatatacaaaaggcacaggtttccggacaaggggactcattgcacgaacatattgcgaatcttgctggttcgccagccatcaaaaagggcatactccagacagtcaaagtagtggatgagctagttaaggtcatgggacgtcacaaaccggaaaacattgtaatcgagatggcacgcgaaaatcaaacgactcagaaggggcaaaaaaacagtcgagagcggatgaagagaatagaagagggtattaaagaactgggcagccagatcttaaaggagcatcctgtggaaaatacccaattgcagaacgagaaactttacctctattacctacaaaatggaagggacatgtatgttgatcaggaactggacataaaccgtttatctgattacgacgtcgatcacattgtaccccaatcctttttgaaggacgattcaatcgacaataaagtgcttacacgctcggataagaaccgagggaaaagtgacaatgttccaagcgaggaagtcgtaaagaaaatgaagaactattggcggcagctcctaaatgcgaaactgataacgcaaagaaagttcgataacttaactaaagctgagaggggtggcttgtctgaacttgacaaggccggatttattaaacgtcagctcgtggaaacccgccaaatcacaaagcatgttgcacagatactagattcccgaatgaatacgaaatacgacgagaacgataagctgattcgggaagtcaaagtaatcactttaaagtcaaaattggtgtcggacttcagaaaggattttcaattctataaagttagggagataaataactaccaccatgcgcacgacgcttatcttaatgccgtcgtagggaccgcactcattaagaaatacccgaagctagaaagtgagtttgtgtatggtgattacaaagtttatgacgtccgtaagatgatcgcgaaaagcgaacaggagataggcaaggctacagccaaatacttcttttattctaacattatgaatttctttaagacggaaatcactctggcaaacggagagatacgcaaacgacctttaattgaaaccaatggggagacaggtgaaatcgtatgggataagggccgggacttcgcgacggtgagaaaagttttgtccatgccccaagtcaacatagtaaagaaaactgaggtgcagaccggagggttttcaaaggaatcgattcttccaaaaaggaatagtgataagctcatcgctcgtaaaaaggactgggacccgaaaaagtacggtggcttcgatagccctacagttgcctattctgtcctagtagtggcaaaagttgagaagggaaaatccaagaaactgaagtcagtcaaagaattattggggataacgattatggagcgctcgtcttttgaaaagaaccccatcgacttccttgaggcgaaaggttacaaggaagtaaaaaaggatctcataattaaactaccaaagtatagtctgtttgagttagaaaatggccgaaaacggatgttggctagcgccggagagcttcaaaaggggaacgaactcgcactaccgtctaaatacgtgaatttcctgtatttagcgtcccattacgagaagttgaaaggttcacctgaagataacgaacagaagcaactttttgttgagcagcacaaacattatctcgacgaaatcatagagcaaatttcggaattcagtaagagagtcatcctagctgatgccaatctggacaaagtattaagcgcatacaacaagcacagggataaacccatacgtgagcaggcggaaaatattatccatttgtttactcttaccaacctcggcgctccagccgcattcaagtattttgacacaacgatagatcgcaaacgatacacttctaccaaggaggtgctagacgcgacactgattcaccaatccatcacgggattatatgaaactcggatagatttgtcacagcttgggggtgacggatcccccaagaagaagaggaaagtctcgagcgactacaaagaccatgacggtgattataaagatcatgacatcgattacaaggatgacgatgacaaggctgcagga

SEQ ID NO: 4 - protein, 1368 aa, Streptococcus pyogenes
MDKKYSIGLAIGTNSVGWAVITDEYKVPSKKFKVLGNTDRHSIKKNLIGALLFDSGETAEATRLKRTARRRYTRRKNRICYLQEIFSNEMAKVDDSFFHRLEESFLVEEDKKHERHPIFGNIVDEVAYHEKYPTIYHLRKKLVDSTDKADLRLIYLALAHMIKFRGHFLIEGDLNPDNSDVDKLFIQLVQTYNQLFEENPINASGVDAKAILSARLSKSRRLENLIAQLPGEKKNGLFGNLIALSLGLTPNFKSNFDLAEDAKLQLSKDTYDDDLDNLLAQIGDQYADLFLAAKNLSDAILLSDILRVNTEITKAPLSASMIKRYDEHHQDLTLLKALVRQQLPEKYKEIFFDQSKNGYAGYIDGGASQEEFYKFIKPILEKMDGTEELLVKLNREDLLRKQRTFDNGSIPHQIHLGELHAILRRQEDFYPFLKDNREKIEKILTFRIPYYVGPLARGNSRFAWMTRKSEETITPWNFEEVVDKGASAQSFIERMTNFDKNLPNEKVLPKHSLLYEYFTVYNELTKVKYVTEGMRKPAFLSGEQKKAIVDLLFKTNRKVTVKQLKEDYFKKIECFDSVEISGVEDRFNASLGTYHDLLKIIKDKDFLDNEENEDILEDIVLTLTLFEDREMIEERLKTYAHLFDDKVMKQLKRRRYTGWGRLSRKLINGIRDKQSGKTILDFLKSDGFANRNFMQLIHDDSLTFKEDIQKAQVSGQGDSLHEHIANLAGSPAIKKGILQTVKVVDELVKVMGRHKPENIVIEMARENQTTQKGQKNSRERMKRIEEGIKELGSQILKEHPVENTQLQNEKLYLYYLQNGRDMYVDQELDINRLSDYDVDHIVPQSFLKDDSIDNKVLTRSDKNRGKSDNVPSEEVVKKMKNYWRQLLNAKLITQRKFDNLTKAERGGLSELDKAGFIKRQLVETRQITKHVAQILDSRMNTKYDENDKLIREVKVITLKSKLVSDFRKDFQFYKVREINNYHHAHDAYLNAVVGTALIKKYPKLESEFVYGDYKVYDVRKMIAKSEQEIGKATAKYFFYSNIMNFFKTEITLANGEIRKRPLIETNGETGEIVWDKGRDFATVRKVLSMPQVNIVKKTEVQTGGFSKESILPKRNSDKLIARKKDWDPKKYGGFDSPTVAYSVLVVAKVEKGKSKKLKSVKELLGITIMERSSFEKNPIDFLEAKGYKEVKKDLIIKLPKYSLFELENGRKRMLASAGELQKGNELALPSKYVNFLYLASHYEKLKGSPEDNEQKQLFVEQHKHYLDEIIEQISEFSKRVILADANLDKVLSAYNKHRDKPIREQAENIIHLFTLTNLGAPAAFKYFDTTIDRKRYTSTKEVLDATLIHQSITGLYETRIDLSQLGGD

SEQ ID NO: 5 - protein, 5 aa, Artificial Sequence
  Synthetic Polypeptide
  VARIANT (1)...(5): Can be present in repeats of any integer between 1 to 30
GGGGS

SEQ ID NO: 6 - protein, 5 aa, Artificial Sequence
  Synthetic Polypeptide
  VARIANT (1)...(5): Can be present in repeats of any integer between 1 to 30
EAAAK

SEQ ID NO: 7 - protein, 16 aa, Artificial Sequence
  Synthetic Polypeptide
SGSETPGTSESATPES

SEQ ID NO: 8 - DNA, 4107 bp, Streptococcus pyogenes
atggataagaaatactcaataggcttagatatcggcacaaatagcgtcggatgggcggtgatcactgatgaatataaggttccgtctaaaaagttcaaggttctgggaaatacagaccgccacagtatcaaaaaaaatcttataggggctcttttatttgacagtggagagacagcggaagcgactcgtctcaaacggacagctcgtagaaggtatacacgtcggaagaatcgtatttgttatctacaggagattttttcaaatgagatggcgaaagtagatgatagtttctttcatcgacttgaagagtcttttttggtggaagaagacaagaagcatgaacgtcatcctatttttggaaatatagtagatgaagttgcttatcatgagaaatatccaactatctatcatctgcgaaaaaaattggtagattctactgataaagcggatttgcgcttaatctatttggccttagcgcatatgattaagtttcgtggtcattttttgattgagggagatttaaatcctgataatagtgatgtggacaaactatttatccagttggtacaaacctacaatcaattatttgaagaaaaccctattaacgcaagtggagtagatgctaaagcgattctttctgcacgattgagtaaatcaagacgattagaaaatctcattgctcagctccccggtgagaagaaaaatggcttatttgggaatctcattgctttgtcattgggtttgacccctaattttaaatcaaattttgatttggcagaagatgctaaattacagctttcaaaagatacttacgatgatgatttagataatttattggcgcaaattggagatcaatatgctgatttgtttttggcagctaagaatttatcagatgctattttactttcagatatcctaagagtaaatactgaaataactaaggctcccctatcagcttcaatgattaaacgctacgatgaacatcatcaagacttgactcttttaaaagctttagttcgacaacaacttccagaaaagtataaagaaatcttttttgatcaatcaaaaaacggatatgcaggttatattgatgggggagctagccaagaagaattttataaatttatcaaaccaattttagaaaaaatggatggtactgaggaattattggtgaaactaaatcgtgaagatttgctgcgcaagcaacggacctttgacaacggctctattccccatcaaattcacttgggtgagctgcatgctattttgagaagacaagaagacttttatccatttttaaaagacaatcgtgagaagattgaaaaaatcttgacttttcgaattccttattatgttggtccattggcgcgtggcaatagtcgttttgcatggatgactcggaagtctgaagaaacaattaccccatggaattttgaagaagttgtcgataaaggtgcttcagctcaatcatttattgaacgcatgacaaactttgataaaaatcttccaaatgaaaaagtactaccaaaacatagtttgctttatgagtattttacggtttataacgaattgacaaaggtcaaatatgttactgaaggaatgcgaaaaccagcatttctttcaggtgaacagaagaaagccattgttgatttactcttcaaaacaaatcgaaaagtaaccgttaagcaattaaaagaagattatttcaaaaaaatagaatgttttgatagtgttgaaatttcaggagttgaagatagatttaatgcttcattaggtacctaccatgatttgctaaaaattattaaagataaagattttttggataatgaagaaaatgaagatatcttagaggatattgttttaacattgaccttatttgaagatagggagatgattgaggaaagacttaaaacatatgctcacctctttgatgataaggtgatgaaacagcttaaacgtcgccgttatactggttggggacgtttgtctcgaaaattgattaatggtattagggataagcaatctggcaaaacaatattagattttttgaaatcagatggttttgccaatcgcaattttatgcagctgatccatgatgatagtttgacatttaaagaagacattcaaaaagcacaagtgtctggacaaggcgatagtttacatgaacatattgcaaatttagctggtagccctgctattaaaaaaggtattttacagactgtaaaagttgttgatgaattggtcaaagtaatggggcggcataagccagaaaatatcgttattgaaatggcacgtgaaaatcagacaactcaaaagggccagaaaaattcgcgagagcgtatgaaacgaatcgaagaaggtatcaaagaattaggaagtcagattcttaaagagcatcctgttgaaaatactcaattgcaaaatgaaaagctctatctctattatctccaaaatggaagagacatgtatgtggaccaagaattagatattaatcgtttaagtgattatgatgtcgatcacattgttccacaaagtttccttaaagacgattcaatagacaataaggtcttaacgcgttctgataaaaatcgtggtaaatcggataacgttccaagtgaagaagtagtcaaaaagatgaaaaactattggagacaacttctaaacgccaagttaatcactcaacgtaagtttgataatttaacgaaagctgaacgtggaggtttgagtgaacttgataaagctggttttatcaaacgccaattggttgaaactcgccaaatcactaagcatgtggcacaaattttggatagtcgcatgaatactaaatacgatgaaaatgataaacttattcgagaggttaaagtgattaccttaaaatctaaattagtttctgacttccgaaaagatttccaattctataaagtacgtgagattaacaattaccatcatgcccatgatgcgtatctaaatgccgtcgttggaactgctttgattaagaaatatccaaaacttgaatcggagtttgtctatggtgattataaagtttatgatgttcgtaaaatgattgctaagtctgagcaagaaataggcaaagcaaccgcaaaatatttcttttactctaatatcatgaacttcttcaaaacagaaattacacttgcaaatggagagattcgcaaacgccctctaatcgaaactaatggggaaactggagaaattgtctgggataaagggcgagattttgccacagtgcgcaaagtattgtccatgccccaagtcaatattgtcaagaaaacagaagtacagacaggcggattctccaaggagtcaattttaccaaaaagaaattcggacaagcttattgctcgtaaaaaagactgggatccaaaaaaatatggtggttttgatagtccaacggtagcttattcagtcctagtggttgctaaggtggaaaaagggaaatcgaagaagttaaaatccgttaaagagttactagggatcacaattatggaaagaagttcctttgaaaaaaatccgattgactttttagaagctaaaggatataaggaagttaaaaaagacttaatcattaaactacctaaatatagtctttttgagttagaaaacggtcgtaaacggatgctggctagtgccggagaattacaaaaaggaaatgagctggctctgccaagcaaatatgtgaattttttatatttagctagtcattatgaaaagttgaagggtagtccagaagataacgaacaaaaacaattgtttgtggagcagcataagcattatttagatgagattattgagcaaatcagtgaattttctaagcgtgttattttagcagatgccaatttagataaagttcttagtgcatataacaaacatagagacaaaccaatacgtgaacaagcagaaaatattattcatttatttacgttgacgaatcttggagctcccgctgcttttaaatattttgatacaacaattgatcgtaaacgatatacgtctacaaaagaagttttagatgccactcttatccatcaatccatcactggtctttatgaaacacgcattgatttgagtcagctaggaggtgactga

SEQ ID NO: 9 - protein, 1368 aa, Artificial Sequence
  Synthetic Polypeptide
MDKKYSIGLAIGTNSVGWAVITDEYKVPSKKFKVLGNTDRHSIKKNLIGALLFDSGETAEATRLKRTARRRYTRRKNRICYLQEIFSNEMAKVDDSFFHRLEESFLVEEDKKHERHPIFGNIVDEVAYHEKYPTIYHLRKKLVDSTDKADLRLIYLALAHMIKFRGHFLIEGDLNPDNSDVDKLFIQLVQTYNQLFEENPINASGVDAKAILSARLSKSRRLENLIAQLPGEKKNGLFGNLIALSLGLTPNFKSNFDLAEDAKLQLSKDTYDDDLDNLLAQIGDQYADLFLAAKNLSDAILLSDILRVNTEITKAPLSASMIKRYDEHHQDLTLLKALVRQQLPEKYKEIFFDQSKNGYAGYIDGGASQEEFYKFIKPILEKMDGTEELLVKLNREDLLRKQRTFDNGSIPHQIHLGELHAILRRQEDFYPFLKDNREKIEKILTFRIPYYVGPLARGNSRFAWMTRKSEETITPWNFEEVVDKGASAQSFIERMTNFDKNLPNEKVLPKHSLLYEYFTVYNELTKVKYVTEGMRKPAFLSGEQKKAIVDLLFKTNRKVTVKQLKEDYFKKIECFDSVEISGVEDRFNASLGTYHDLLKIIKDKDFLDNEENEDILEDIVLTLTLFEDREMIEERLKTYAHLFDDKVMKQLKRRRYTGWGRLSRKLINGIRDKQSGKTILDFLKSDGFANRNFMQLIHDDSLTFKEDIQKAQVSGQGDSLHEHIANLAGSPAIKKGILQTVKVVDELVKVMGRHKPENIVIEMARENQTTQKGQKNSRERMKRIEEGIKELGSQILKEHPVENTQLQNEKLYLYYLQNGRDMYVDQELDINRLSDYDVDAIVPQSFLKDDSIDNKVLTRSDKNRGKSDNVPSEEVVKKMKNYWRQLLNAKLITQRKFDNLTKAERGGLSELDKAGFIKRQLVETRQITKHVAQILDSRMNTKYDENDKLIREVKVITLKSKLVSDFRKDFQFYKVREINNYHHAHDAYLNAVVGTALIKKYPKLESEFVYGDYKVYDVRKMIAKSEQEIGKATAKYFFYSNIMNFFKTEITLANGEIRKRPLIETNGETGEIVWDKGRDFATVRKVLSMPQVNIVKKTEVQTGGFSKESILPKRNSDKLIARKKDWDPKKYGGFDSPTVAYSVLVVAKVEKGKSKKLKSVKELLGITIMERSSFEKNPIDFLEAKGYKEVKKDLIIKLPKYSLFELENGRKRMLASAGELQKGNELALPSKYVNFLYLASHYEKLKGSPEDNEQKQLFVEQHKHYLDEIIEQISEFSKRVILADANLDKVLSAYNKHRDKPIREQAENIIHLFTLTNLGAPAAFKYFDTTIDRKRYTSTKEVLDATLIHQSITGLYETRIDLSQLGGD

SEQ ID NO: 10 - protein, 1368 aa, Streptococcus pyogenes [sequence omitted]

SEQ ID NO: 11 - protein, 1359 aa, Streptococcus pyogenes
MDKKYSIGLDIGTNSVGWAVITDEYKVPSKKFKVLGNTDRHSIKKNLIGALLFDSGETAEATRLKRTARRRYTRRKNRICYLQEIFSNEMAKVDDSFFHRLEESFLVEEDKKHERHPIFGNIVDEVAYHEKYPTIYHLRKKLVDSTDKADLRLIYLALAHMIKFRGHFLIEGDLNPDNSDVDKLFIQLVQTYNQLFEENINASGVDAKAILSARLSKSRRLENLIAQLPGEKKNGLFGNLIALSLGLTPNFKSNFDLAEDAKLQLSKDTYDDDLDNLLAQIGDQYADLFLAAKNLSDAILLSDILRVNTEITKAPLSASMIKRYDEHHQDLTLLKALVRQQLPEKYKEIFFDQSKNGYAGYIDGGASQEEFYKFIKPILEKMDGTEELLVKLNREDLLRKQRTFDNGSIPHQIHLGELHAILRRQEDFYPFLKDNREKIEKILTFRIPYYVGPLARGNSRFAWMTRKSEETITPWNFEEVVDKGASAQSFIERMTNFDKNLPNEKVLPKHSLLYEYFTVYNELTKVKYVTEGMRKPAFLSGEQKKAIVDLLFKTNRKVTVKQLKEDYFKKIECFDSVEISGVEDRFNASLGTYHDLLKIIKDKDFLDNEENEDILEDIVLTLTLFEDREMIEERLKTYAHLFDDKVMKQLKRRRYTGWGRLSRKLINGIRDKQSGKTILDFLKDGFANRNFMQLIHDDSLTFKEDIQKAQVSGQGDSLHEHIANLAGSPAIKKGILQTVKVVDELVKVMGRHKPENIVIEMARENQTTQKGQKNSRERMKRIEEGIKELGSQILKEHPVENTQLQNEKLYLYYLQNGRDMYVDQELDINRLSDYDVDHIVPQSFLKDDSIDNKVLTRSDKNRGKSDNVPSEEVVKKMKNYWRQLLNAKLITQRKFDNLTKAERGGLSELDKAGFIKRQLVETRQITKHVAQILDSRMNTKYDENDKLIREVKVITLKSKLVSDFRKDFQFYKVREINNYHHAHDAYLNAVVGTALIKKYPKLESEFVYGDYKVYDVSEQEIGKATAKYFFYSNIMNFFKTEITLANGEIRKRPLIETNGETGEIVWDKGRDFATVRKVLSMPQVNIVKKTEVQTGGFSKESILPKRNSDKLIARKKDWDPKKYGGFDSPTVAYSVLVVAKVEKGKSKKLKSVKELLGITIMERSSFEKNPIDFLEAKGYKEVKKDLIIKLPKYSLFELENGRKRMLASGELQKGNELALPSKYVNFLYLASHYEKLKGSPEDNEQKQLFVEQHKHYLDEIIEQISEFSKRVILADANLDKVLSAYNKHRDKPIREQAENIIHLFTLTNLGAPAAFKYFDTTIDRKRYTSTKEVLDATLIHQSITGLYETRIDLSQLGGD

SEQ ID NO: 12 - protein, 1355 aa, Streptococcus gallolyticus
MTKKNYSIGLDIGTNSVGWAVITDDYKVPAKKMKVLGNTDKKYIKKNLLGALLFDSGETAEATRLKRTARRRYTRRKNRLRYLQEIFANEIAKVDESFFQRLDESFLTDDDKTFDSHPIFGNKAEEDAYHQKFPTIYHLRKHLADSSEKADLRLVYLALAHMIKFRGHFLIEGELNAENTDVQKIFADFVGVYNRTFDDSHLSEITVDVASILTEKISKSRRLENLIKYYPTEKKNTLFGNLIALALGLQPNFKTNFKLSEDAKLQFSKDTYEEDLEELLGKIGDDYADLFTSAKNLYDAILLSGILTVDDNSTKAPLSASMIKRYVEHHEDLEKLKEFIKANKSELYHDIFKDKNKNGYAGYIENGVKQDEFYKYLKNILSKIKIDGSDYFLDKIEREDFLRKQRTFDNGSIPHQIHLQEMHAILRRQGDYYPFLKEKQDRIEKILTFRIPYYVGPLVRKDSRFAWAEYRSDEKITPWNFDKVIDKEKSAEKFITRMTLNDLYLPEEKVLPKHSHVYETYAVYNELTKIKYVNEQGKESFFDSNMKQEIFDHVFKENRKVTKEKLLNYLNKEFPEYRIKDLIGLDKENKSFNASLGTYHDLKKILDKAFLDDKVNEEVIEDIIKTLTLFEDKDMIHERLQKYSDIFTANQLKKLERRHYTGWGRLSYKLINGIRNKENNKTILDYLIDDGSANRNFMQLINDDTLPFKQIIQKSQVVGDVDDIEAVVHDLPGSPAIKKGILQSVKIVDELVKVMGGNPDNIVIEMARENQTTNRGRSQSQQRLKKLQNSLKPSYIEDKVENSHLQNDQLFLYYIQNGKDMYTGDELDIDHLSDYDIDHIIPQAFIKDDSIDNRVLTSSAKNRGKSDDVPSLDIVRARKAEWVRLYKSGLISKRKFDNLTKAERGGLTEADKAGFIKRQLVETRQITKHVAQILDARFNTEHDENDKVIRDVKVITLKSNLVSQFRKDFEFYKVREINDYHHAHDAYLNAVVGTALLKKYPKLASEFVYGEYKKYDISSDKATAKYFFYSNLMNFFKTKVKYADGTVFERPIIETNADGEIAWNKQIDFEKVRKVLSYPQVNIVKKVETQTGGFSKESILPKGDSDKLIPRKTKKVYWDTKKYGGFDSPTVAYSVFVVADVEKGKAKKLKTVKELVGISIMERSFFEENPVEFLENKGYHNIREDKLIKLPKYSLFEFEGGRRRLLASASELQKGNEMVLPGYLVELLYHAHRADNFNSTEYLNYVSEHKKEFEKVLSCVEDFANLYVDVEKNLSKIRAVADSMDNFSIEEISNSFINLLTLTALGAPADFNFLGEKIPRKRYTSTKECLNATLIHQSITGLYETRIDLSKLGEE

SEQ ID NO: 13 - protein, 1359 aa, Streptococcus mitis
KKGYSIGLDIGTNSVGFAVITDDYKVPSKKMKVLGNTDKRFIKKNLIGALLFDEGTTAEARRLKRTARRRYTRRKNRLRYLQEIFSEEMSKVDSSFFHRLDDSFLIPEDKRESKYPIFATLTEEKEYHKQFPTIYHLRKQLADSKEKTDLRLIYLALAHMIKYRGHFLYEEAFDIKNNDIQKIFNEFISIYDNTFEGSSLSGQNAQVEAIFTDKISKSAKRERVLKLFPDEKSTGLFSEFLKLIVGNQADFKKHFDLEDKAPLQFSKDTYDEDLENLLGQIGDDFTDLFVSAKKLYDAILLSGILTVTDPSTKAPLSASMIERYENHQNDLAALKQFIKNNLPEKYDEVFSDQSKDGYAGYIDGKTTQETFYKYIKNLLSKFEGTDYFLDKIEREDFLRKQRTFDNGSIPHQIHLQEMNAILRRQGEYYPFLKDNKEKIEKILTFRIPYYVGPLARGNRDFAWLTRNSDEAIRPWNFEEIVDKASSAEDFINKMTNYDLYLPEEKVLPKHSLLYETFAVYNELTKVKFIAEGLRDYQFLDSGQKKQIVNQLFKENRKVTEKDIIHYLHNVDGYDGIELKGIEKQFNASLSTYHDLLKIIKDKEFMDDAKNEAILENIVHTLTIFEDREMIKQRLAQYDSLFDEKVIKALTRRHYTGWGKLSAKLINGICDKQTGNTILDYLIDDGKINRNFMQLINDDGLSFKEIIQKAQVIGKTDDVKQVVQELSGSPAIKKGILQSIKIVDELVKVMGHAPESIVIEMARENQTTARGKKNSQQRYKRIEDSLKILASNILKENPTDNNQLQNDRLFLYYLQNGKDMYTGEALDINQLSSYDIDHIIPQAFIKDDSLDNRVLTSSKDNRGKSDNVPSIEVVQKRKAFWQQLLDSKLISERKFNNLTKAERGGLDERDKVGFIKRQLVETRQITKHVAQILDARYNTEVNEKDKKNRTVKIITLKSNLVSNFRKEFRLYKVREINDYHHAHDAYLNAVVAKAILKKYPKLEPEFVYGEYQKYDLSKDPKEVEKATEKYFFYSNLLNFFKEEVHYADGTIVKRENIEYSKDTGEIAWNKEKDFAIIKKVLSLPQVNIVKKREVQTGGFSKESILPKGNSDKLIPRKTKDILLDTTKYGGFDSPVIAYSILLIADIEKGKAKKLKTVKTLVGITIMEKAAFEENPITFLENKGYHNVRKENILCLPKYSLFELENGRRRLLASAKELQKGNEIVLPVYLTTLLYHSKNVHKLDEPGHLEYIQKHRNEFKDLLNLVSEFSQKYVLADANLEKIKSLYADNEQADIEILANSFINLLTFTALGAPAAFKFFGKDIDRKRYTTVSEILNATLIHQSITGLYETWIDLSKLGED

SEQ ID NO: 14 - protein, 986 aa, Staphylococcus Aureus
MKRNYILGLDIGITSVGYGIIDYETRDVIDAGVRLFKEANVENNEGRRSKRGARRLKRRRRHRIQRVKKLLFDYNLLTDHSELSGNPYEARVKGLSQKLSEEEFSAALLHLAKRRGVHNVNEVEEDTGNELSTKEQISRNSKLEEKYVAELQLERLKKDGEVRGSINRKTSDYVKEAKQLLKVQKAYHQLDQSFIDTYIDLLETRRTYYEGPGEGSPFGWKDIKEWYEMLMGHCTYFPEELRSVKYAYNADLYNALNDLNNLVITRDENEKLEYYEKFQIIENVFKQKKKPTLKQIAKEILVNEEDIKGYRVTSTGKPEFTNLKVYHDIKDITARKENAELLDQIAKILTIYQSSEDIQEELTNLNSELTQEEIEQISNLKGYTGTHNLSLKAINLILDELWTNDNQIAIFNRLKLVPKKVDLSQQKEIPTTLVDDFILSPVVKRSFIQSIKVINAIIKKYGLPNDIIIELAREKNSKDAQKMINEMQKQTNEEIIRTTGKENAKYLIEKIKLHDMQEGKCLYSLEAIPLEDLLNNPFNYEVDHIIPRSVSFDNSFNNKVLVKQEEASKKGNRTPFQYLSSSDSKISYETFKKHILNLAKGKGRISKTKKEYLLEERDQKDFINRNLVDTRYATRGLMNLLRSYFRVNNLDVKVKSINGGFTSFLRRKWKFKKERNKGYKHHAEDALIIANADFIFKEWKKLDKNQMFEEKETEQEYKEIFITPHQIKHIKDFKDYKYSHRVDKKPNREVNNLNGLYDKDNDKLKKLINKSPEKLLMYHHDPQTYQKKLIMEQYGDEKNLYKYYEETGNYLTKYSKKDNGPVIKKIKYYGNKLNAHLDITDDYPNSVKLSLKPYRFDVYLDNGVYKFVTVKNLDVIKKENYYEVNSKAYEEAKKKKISNQAEFIASFYNNDLIKINGELYRVIGVNNDLLNRIEVNMIDITYREYLENMNDKRPPRIIKTIASKTQSIKKLYEVKSKKHPQIIKKG

SEQ ID NO: 15 - protein, 1044 aa, Streptococcus pyogenes
LSASMIKRYDEHHQDLTLLKALVRQQLPEKYKEIFFDQSKNGYAGYIDGGASQEEFYKFIKPILEKMDGTEELLAKLNREDLLRKQRTFDNGSIPHQIHLGELHAILRRQEDFYPFLKDNREKIEKILTFRIPYYVGPLARGNSRFAWMTRKSEETITPWNFEEVVDKGASAQSFIERMTNFDKNLPNEKVLPKHSLLYEYFTVYNELTKVKYVTEGMRKPAFLSGEQKKAIVDLLFKTNRKVTVKQLKEDYFKKIECFDSVEISGVEDRFNASLGTYHDLLKIIKDKDFLDNEENEDILEDIVLTLTLFEDREMIEERLKTYAHLFDDKVMKQLKRRRYTGWGRLSRKLINGIRDKQSGKTILDFLKDGFANRNFMQLIHDDSLTFKEDLQKAQVSGQGDSLHEHIANLAGSPAIKKGILQTVKVVDELVKVMGRHKPENIVIEMARENQTTQKGQKNSRERMKRIEEGIKELGSDILKEYPVENTQLQNEKLYLYYLQNGRDMYVDQELDINRLSDYDVDHIVPQSFLKDDSIDNKVLTRSDKNRGKSDNVPSEEVVKKMKNYWKQLLNAKLITQRKFDNLTKAERGGLSELDKAGFIKRQLVETRQITKHVAQILDSRMNTKYDENDKLIREVRVITLKSKLVSDFRKDFQFYKVREINNYHHAHDAYLNAVVGTALIKKYPKLESEFVYGDYKVYDISEQEIGKATAKYFFYSNIMNFFKTEITLANGEIRKRPLIETNGETGEIVWDKGRDFATVRKVLSMPQVNIVKKTEVQTGGFSKESILPKRNSDKLIARKKDWDPKKYGGFDSPTVAYSVLVVAKVEKGKSKKLKSVKELVGITIMERSSFEKDPVDFLEAKGYKEVRKDLIIKLPKYSLFELENGRKRMLASGELQKGNELALPSKYVNFLYLASHYEKLKGSPEDNEQKQLFVEQHKHYLDEIIEQISEFSKRVILADANLDKVLSAYNKHRDKPIREQAENIIHLFTLTNLGAPAAFKCFDTTIGRNRYKSIKEVLDATLIHQSITGLYETRIDLSQLGGD

SEQ ID NO: 16 - protein, 1359 aa, Streptococcus pyogenes; identical to SEQ ID NO: 11

SEQ ID NO: 17 - protein, 1359 aa, Streptococcus pyogenes
MDKKYSIGLDIGTNSVGWAVITDDYKVPSKKLKGLGNTDRHGIKKNLIGALLFDSGETAEATRLKRTARRRYTRRKNRICYLQEIFSNEMAKVDDSFFHRLEESFLVEEDKKHERHPIFGNIVDEVAYHEKYPTIYHLRKKLADSTDKVDLRLIYLALAHMIKFRGHFLIEGDLNPDNSDVDKLFIQLVQTYNQLFEENINASRVDAKAILSARLSKSRRLENLIAQLPGEKKNGLFGNLIALSLGLTPNFKSNFDLAEDAKLQLSKDTYDDDLDNLLAQIGDQYADLFLAAKNLSDATLLSDILRVNSEITKAPLSASMIKRYDEHHQDLTLLKALVRQQLPEKYKEIFFDQSKNGYAGYIDGGASQEEFYKFIKPILEKMDGTEELLAKLNREDLLRKQRTFDNGSIPYQIHLGELHAILRRQEDFYPFLKDNREKIEKILTFRIPYYVGPLARGNSRFAWMTRKSEETITPWNFEEVVDKGASAQSFIERMTNFDKNLPNEKVLPKHSLLYEYFTVYNELTKVKYVTEGMRKPAFLSGEQKKAIVDLLFKTNRKVTVKQLKEDYFKKIECFDSVEISGVEDRFNASLGTYHDLLKIIKDKDFLDNEENEDILEDIVLTLTLFEDREMIEERLKTYAHLFDDKVMKQLKRRRYTGWGRLSRKLINGIRDKQSGKTILDFLKDGFANRNFMQLIHDDSLTFKEDIQKAQVSGQGDSLHEHIANLAGSPAIKKGILQTVKVVDELVKVMGRHKPENIVIEMARENQTTQKGQKNSRERMKRIEEGIKELGSDILKEYPVENTQLQNEKLYLYYLQNGRDMYVDQELDINRLSDYDVDHIVPQSFLKDDSIDNKVLTRSDKNRGKSDNVPSEEVVKKMKNYWRQLLNAKLITQRKFDNLTKAERGGLSELDKVGFIKRQLVETRQITKHVAQILDSRMNTKYDENDKLIREVRVITLKSKLVSDFRKDFQFYKVREINNYHHAHDAYLNAVVGTALIKKYPKLESEFVYGDYKVYDVSEQEIGKATAKYFFYSNIMNFFKTEITLANGEIRKRPLIETNGETGEIVWDKGRDFATVRKVLSMPQVNIVKKTEVQTGGFSKESILPKRNSDKLIARKKDWDPKKYGGFDSPTVAYSVLVVAKVEKGKSKKLKSVKELLGITIMERSSFEKDPIDFLEAKGYKEVRKDLIIKLPKYSLFELENGRKRMLASGELQKGNELALPSKYVNFLYLASHYEKLKGSPEDNEQKQLFVEQHKHYLDEIIEQISEFSKRVILADANLDKVLSAYNKHRDKPIREQAENIIHLFTLTNLGAPAAFKYFDTTIDRKRYTSTKEVLDATLIHQSITGLYETRIDLSQLGGD

SEQ ID NO: 18 - protein, 1359 aa, Streptococcus pyogenes
MDKKYSIGLDIGTNSVGWAVITDDYKVPSKKFKVLGNTDRHSIKKNLIGALLFDSGETAEATRLKRTARRRYTRRKNRICYLQEIFSNEMAKVDDSFFHRLEESFLVEEDKKHERHPIFGNIVDEVAYHEKYPTIYHLRKKLVDSTDKADLRLIYLALAHMIKFRGHFLIEGDLNPDNSDVDKLFIQLVQTYNQLFEENINASGVDAKAILSARLSKSRRLENLIAQLPGEKKNGLFGNLIALSLGLTPNFKSNFDLAEDAKLQLSKDTYDDDLDNLLAQIGDQYADLFLAAKNLSDAILLSDILRLNSEITKAPLSASMIKRYDEHHQDLTLLKALVRQQLPEKYKEIFFDQSKNGYAGYIDGGASQEEFYKFIKPILEKMDGTEELLAKLNREDLLRKQRTFDNGSIPHQIHLGELHAILRRQEDFYPFLKDNREKIEKILTFRIPYYVGPLARGNSRFAWMTRKSEETITPWNFEEVVDKGASAQSFIERMTNFDKNLPNEKVLPKHSLLYEYFTVYNELTKVKYVTEGMRKPAFLSGEQKKAIVDLLFKTNRKVTVKQLKEDYFKKIECFDSVEISGVEDRFNASLGTYHDLLKIIKDKDFLDNEENEDILEDIVLTLTLFEDREMIEERLKTYAHLFDDKVMKQLKRRRYTGWGRLSRKLINGIRDKQSGKTILDFLKDGFANRNFMQLIHDDSLTFKEDIQKAQVSGQGDSLHEHIANLAGSPAIKKGILQTVKVVDELVKVMGRHKPENIVIEMARENQTTQKGQKNSRERMKRIEEGIKELGSQILKEHPVENTQLQNEKLYLYYLQNGRDMYVDQELDINRLSDYDVDHIVPQSFIKDDSIDNKVLTRSDKNRGKSNNVPSEEVVKKMKNYWRQLLNAKLITQRKFDNLTKAERGGLSELDKAGFIKRQLVETRQITKHVAQILDSRMNTKYDENDKLIREVKVITLKSKLVSDFRKDFQFYKVREINNYHHAHDAYLNAVVGTALIKKYPKLESEFVYGDYKVYDVSEQEIGKATAKYFFYSNIMNFFKTEITLANGEIRKRPLIETNGETGEIVWDKGRDFATVRKVLSMPQVNIVKKTEVQTGGFSKESILPKRNSDKLIARKKDWDPKKYGGFDSPTVAYSVLVVAKVEKGKSKKLKSVKELLGITIMERSSFEKNPIDFLEAKGYKEVRKDLIVKLPKYSLFELENGRKRMLASGELQKGNELALPSKYVNFLYLASHYEKLKGSPEDNEQKQLFVEQHKHYLDEIIEQISEFSKRVILADANLDKVLSAYNKHRDKPIREQAENIIHLFTLTNLGAPAAFKYFDTTIDRKRYTSTKEVLDATFIHQSITGLYETRIDLSQLGGD

SEQ ID NO: 19 - protein, 1359 aa, Streptococcus pyogenes
MDKKYSIGLDIGTNSVGWAVITDDYKVPSKKFKVLGNTDRHSIKKNLIGALLFDSGETAEATRLKRTARRRYTRRKNRICYLQEIFSNEMAKVDDSFFHRLEESFLVEEDKKHERHPIFGNIVDEVAYHEKYPTIYHLRKKLVDSTDKADLRLIYLALAHMIKFRGHFLIEGDLNPDNSDVDKLFIQLVQTYNQLFEENINASGVDAKAILSARLSKSRRLENLIAQLPGEKKNGLFGNLIALSLGLTPNFKSNFDLAEDAKLQLSKDTYDDDLDNLLAQIGDQYADLFLAAKNLSDAILLSDILRVNTEITKAPLSASMIKRYDEHHQDLTLLKALVRQQLPEKYKEIFFDQSKNGYAGYIDGGASQEEFYKFIKPILEKMDGTEELLVKLNREDLLRKQRTFDNGSIPHQIHLGELHAILRRQEDFYPFLKDNREKIEKILTFRIPYYVGPLARGNSRFAWMTRKSEETITPWNFEEVVDKGASAQSFIERMTNFDKNLPNEKVLPKHSLLYEYFTVYNELTKVKYVTEGMRKPAFLSGEQKKAIVDLLFKTNRKVTVKQLKEDYFKKIECFDSVEISGVEDRFNASLGTYHDLLKIIKDKDFLDNEENEDILEDIVLTLTLFEDREMIEERLKTYAHLFDDKVMKQLKRRRYTGWGRLSRKLINGIRDKQSGKTILDFLKDGFANRNFMQLIHDDSLTFKEDIQKAQVSGQGDSLHEHIANLAGSPAIKKGILQTVKVVDELVKVMGRHKPENIVIEMARENQTTQKGQKNSRERMKRIEEGIKELGSQILKEHPVENTQLQNEKLYLYYLQNGRDMYVDQELDINRLSDYDVDHIVPQSFLKDDSIDNKVLTRSDKNRGKSDNVPSEEVVKKMKNYWRQLLNAKLITQRKFDNLTKAERGGLSELDKAGFIKRQLVETRQITKHVAQILDSRMNTKYDENDKLIREVKVITLKSKLVSDFRKDFQFYKVREINNYHHAHDAYLNAVVGTALIKKYPKLESEFVYGDYKVYDVSEQEIGKATAKYFFYSNIMNFFKTEITLANGEIRKRPLIETNGETGEIVWDKGRDFATVRKVLSMPQVNIVKKTEVQTGGFSKESILPKRNSDKLIARKKDWDPKKYGGFDSPTVAYSVLVVAKVEKGKSKKLKSVKELLGITIMERSSFEKNPIDFLEAKGYKEVKKDLIIKLPKYSLFELENGRKRMLASGELQKGNELALPSKYVNFLYLASHYEKLKGSPEDNEQKQLFVEQHKHYLDEIIEQISEFSKRVILADANLDKVLSAYNKHRDKPIREQAENIIHLFTLTNLGAPAAFKYFDTTIDRKRYTSTKEVLDATLIHQSITGLYETRIDLSQLGGD

SEQ ID NO: 20 - protein, 1359 aa, Streptococcus pyogenes
MDKKYSIGLDIGTNSVGWAVITDDYKVPSKKFKVLGNTDRHSIKKNLIGALLFDSGEIAEATRLKRTARRRYTRRKNRICYLQEIFSNEMAKVDDSFFHRLEESFLVEEDKKHERHPIFGNIVDEVAYHEKYPTIYHLRKKLVDSTDKADLRLIYLALAHMIKFRGHFLIEGDLNPDNSDVDKLFIQLVQTYNQLFEENINASGVDAKAILSARLSKSRRLENLIAQLPGEKKNGLFGNLIALSLGLTPNFKSNFDLAEDAKLQLSKDTYDDDLDNLLAQIGDQYADLFLAAKNLSDAILLSDILRLNSEITKAPLSASMIKRYDEHHQDLTLLKALVRQQLPEKYKEIFFDQSKNGYAGYIDGGASQEEFYKFIKPILEKMDGTEELLAKLNREDLLRKQRTFDNGSIPHQIHLGELHAILRRQEDFYPFLKDNREKIEKILTFRIPYYVGPLARGNSRFAWMTRKSEETITPWNFEEVVDKGASAQSFIERMTNFDKNLPNEKVLPKHSLLYEYFTVYNELTKVKYVTEGMRKPAFLSGEQKKAIVDLLFKTNRKVTVKQLKEDYFKKIECFDSVEISGVEDRFNASLGTYHDLLKIIKDKDFLDNEENEDILEDIVLTLTLFEDREMIEERLKTYAHLFDDKVMKQLKRRRYTVWGRLSRKLINGIRDKQSGKTILDFLKDGFANRNFMQLIHDDSLTFKEDIQKAQVSGQGDSLHEHIANLAGSPAIKKGILQTVKVVDELVKVMGRHKPENIVIEMARENQTTQKGQKNSRERMKRIEEGIKELGSQILKEHPVENTQLQNEKLYLYYLQNGRDMYVDQELDINRLSDYDVDHIVPQSFIKDDSIDNKVLTRSDKNRGKSDNVPSEEVVKKMKNYWRQLLNAKLITQRKFDNLTKAERGGLSELDKAGFIKRQLVETRQITKHVAQILDSRMNTKYDENDKLIREVKVITLKSKLVSDFRKDFQFYKVREINNYHHAHDAYLNAVVGTALIKKYPKLESEFVYGDYKVYDVSEQEIGKATAKYFFYSNIMNFFKTEITLANGEIRKRPLIETNGETGEIVWDKGRDFATVRKVLSMPQVNIVKKTEVQTGGFSKESILPKRNSDKLIARKKDWDPKKYGGFDSPTVAYSVLVVAKVEKGKSKKLKSVKELLGITIMERSSFEKNPIDFLEAKGYKEVRKDLIIKLPKYSLFELENGRKRMLASGELQKGNELALPSKYVNFLYLASHYEKLKGSPEDNEQKQLFVEQHKHYLDEIIEQISEFSKRVILADANLDKVLSAYNKHRDKPIREQAENIIHLFTLTNLGAPTAFKYFDTTIDRKRYTSTKEVLDATFIHQSITGLYETRIDLSQLGGD

SEQ ID NO: 21 - protein, 1359 aa, Streptococcus pyogenes
MDKKYSIGLDIGTNSVGWAVITDDYKVPSKKFKVLGNTDRHSIKKNLIGALLFDSGETAEATRLKRTARRRYTRRKNRICYLQEIFSNEIAKVDDSFFHRLEESFLVEEDKKHERHPIFGNIVDEVAYHEKYPTIYHLRKKLADSTDKADLRLIYLALAHMIKFRGHFLIEGDLNPDNSDVDKLFIQLVQTYNQLFEENINASRVDAKAILSARLSKSRRLENLIAQLPGEKRNGLFGNLIALSLGLTPNFKSNFDLAEDAKLQLSKDTYDDDLDNLLAQIGDQYADLFLAAKNLSDAILLSDILRVNTEITKAPLSASMIKRYDEHHQDLTLLKALVRQQLPEKYKEIFFDQSKNGYAGYIDGGASQEEFYKFIKPILEKMDGTEELLAKLNREDLLRKQRTFDNGSIPHQIHLGELHAILRRQEDFYPFLKDNREKIEKILTFRIPYYVGPLARGNSRFAWMTRKSEETITPWNFEEVVDKGASAQSFIERMTNFDKNLPNEKVLPKHSLLYEYFTVYNELTKVKYVTEGMRKPAFLSGEQKKAIVDLLFKTNRKVTVKQLKEDYFKKIECFDSVEISGVEDRFNASLGTYHDLLKIIKDKDFLDNEENEDILEDIVLTLTLFEDREMIEERLKTYAHLFDDKVMKQLKRRRYTGWGRLSRKLINGIRDKQSGKTILDFLKDGFANRNFMQLIHDDSLTFKEDLQKAQVSGQGDSLHEHIANLAGSPAIKKGILQTVKVVDELVKVMGRHKPENIVIEMARENQTTQKGQKNSRERMKRIEEGIKELGSDILKEYPVETTQLQNEKLYLYYLQNGRDMYVDQELDINRLSDYDVDHIVPQSFLKDDSIDNKVLTRSDKNRGKSDNVPSEEVVKKMKNYWKQLLNAKLITQRKFDNLTKAERGGLSELDKAGFIKRQLVETRQITKHVAQILDSRMNTKYDENDKLIREVRVITLKSKLVSDFRKDFQFYKVREINNYHHAHDAYLNAVVGTALIKKYPKLESEFVYGDYKVYDISEQEIGKATAKYFFYSNIMNFFKTEITLANGEIRKRPLIETNGETGEIVWDKGRDFATVRKVLSMPQVNIVKKTEVQTGGFSKESILPKRNSDKLIARKKDWDPKKYGGFDSPTVAYSVLVVAKVEKGKSKKLKSVKELVGITIMERSSFEKDPVDFLEAKGYKEVRKDLIIKLPKYSLFELENGRKRMLASGELQKGNELALPSKYVNFLYLASHYEKLKGSPEDNEQKQLFVEQHKHYLDEIIEQISEFSKRVILADANLDKVLSAYNKHRDKPIREQAENIIHLFTLTNLGAPAAFKCFDTTIGRNRYKSIKEVLDATLIHQSITGLYETRIDLSQLGGD

SEQ ID NO: 22 - protein, 1358 aa, Streptococcus pyogenes
MDKKYSIGLDIGTNSVGWAVITDDYKVPSKKFKVLGNTDRHSIKKNLIGALLFGSGETAEATRLKRTARRRYTRRKNRICYLQEIFSNEMAKVDDSFFHRLEESFLVEEDKKHERHPIFGNIVDEVAYHEKYPTIYHLRKKLADSTDKADLRLIYLALAHMIKFRGHFLIEGDLNPDNSDVDKLFIQLVQIYNQLFEENINASRVDAKAILSARLSKSRRLENLIAQLPGEKRNGLFGNLIALSLGLTPNFKSNFDLAEDAKLQLSKDTYDDDLDNLLAQIGDQYADLFLAAKNLSDAILLSDILRVNSEITKAPLSASMIKRYDEHHQDLTLLKALVRQQLPEKYKEIFFDQSKNGYAGYIDGGASQEEFYKFIKPILEKMDGTEELLVKLNREDLLRKQRTFDNGSIPHQIHLGELHAILRRQEDFYPFLKDNREKIEKILTFRIPYYVGPLARGNSRFAWMTRKSEETITPWNFEEVVDKGASAQSFIERMTNFDKNLPNEKVLPKHSLLYEYFTVYNELTKVKYVTEGMRKPAFLSGEQKKAIVDLLFKTNRKVTVKQLKEDYFKKIECFDSVEISGVEDRFNASLGAYHDLLKIIKDKDFLDNEENEDILEDIVLTLTLFEDRGMIEERLKTYAHLFDDKVMKQLKRRRYTGWGRLSRKLINGIRDKQSGKTILDFLKDGFANRNFMQLIHDDSLTFKEDIQKAQVSGQGHSLHEQIANLAGSPAIKKGILQTVKIVDELVKVMGHKPENIVIEMARENQTTQKGQKNSRERMKRIEEGIKELGSQILKEHPVENTQLQNEKLYLYYLQNGRDMYVDQELDINRLSDYDVDHIVPQSFIKDDSIDNKVLTRSDKNRGKSDNVPSEEVVKKMKNYWRQLLNAKLITQRKFDNLTKAERGGLSELDKAGFIKRQLVETRQITKHVAQILDSRMNTKYDENDKLIREVKVITLKSKLVSDFRKDFQFYKVREINNYHHAHDAYLNAVVGTALIKKYPKLESEFVYGDYKVYDVSEQEIGKATAKYFFYSNIMNFFKTEITLANGEIRKRPLIETNGETGEIVWDKGRDFATVRKVLSMPQVNIVKKTEVQTGGFSKESILPKRNSDKLIARKKDWDPKKYGGFDSPTVAYSVLVVAKVEKGKSKKLKSVKELLGITIMERSSFEKNPIDFLEAKGYKEVKKDLIIKLPKYSLFELENGRKRMLASGELQKGNELALPSKYVNFLYLASHYEKLKGSPEDNEQKQLFVEQHKHYLDEIIEQISEFSKRVILADANLDKVLSAYNKHRDKPIREQAENIIHLFTLTNLGAPAAFKYFDTTIDRKRYTSTKEVLDATLIHQSITGLYETRIDLSQLGGD

SEQ ID NO: 23 - protein, 1359 aa, Streptococcus pyogenes
MDKKYSIGLDIGTNSVGWAVITDDYKVPSKKFKVLGNTDRHSIKKNLIGALLFDSGETAEATRLKRTARRRYTRRKNRICYLQEIFSNEMAKVDDSFFHRLEESFLVEEDKKHERHPIFGNIVDEVAYHEKYPTIYHLRKKLVDSTDKADLRLIYLALAHMIKFRGHFLIEGDLNPDNSDVDKLFIQLVQTYNQLFEENINASGVDAKAILSARLSKSRRLENLIAQLPGEKKNGLFGNLIALSLGLTPNFKSNFDLAEDAKLQLSKDTYDDDLDNLLAQIGDQYADLFLAAKNLSDAILLSDILRLNSEITKAPLSASMIKRYDEHHQDLTLLKALVRQQLPEKYKEIFFDQSKNGYAGYIDGGASQEEFYKFIKPILEKMDGTEELLAKLNREDLLRKQRTFDNGSIPHQIHLGELHAILRRQEDFYPFLKDNREKIEKILTFRIPYYVGPLARGNSRFAWMTRKSEETITPWNFEEVVDKGASAQSFIERMTNFDKNLPNEKVLPKHSLLYEYFTVYNELTKVKYVTEGMRKPAFLSGEQKKAIVDLLFKTNRKVTVKQLKEDYFKKIECFDSVEISGVEDRFNASLGTYHDLLKIIKDKDFLDNEENEDILEDIVLTLTLFEDREMIEERLKTYAHLFDDKVMKQLKRRRYTGWGRLSRKLINGIRDKQSGKTILDFLKDGFANRNFMQLIHDDSLTFKEDIQKAQVSGQGDSLHEHIANLAGSPAIKKGILQTVKVVDELVKVMGRHKPENIVIEMARENQTTQKGQKNSRERMKRIEEGIKELGSQILKEHPVENTQLQNEKLYLYYLQNGRDMYVDQELDINRLSDYDVDHIVPQSFIKDDSIDNKVLTRSDKNRGKSDNVPSEEVVKKMKNYWRQLLNAKLITQRKFDNLTKAERGGLSELDKAGFIKRQLVETRQITKHVAQILDSRMNTKYDENDKLIREVKVITLKSKLVSDFRKDFQFYKVREINNYHHAHDAYLNAVVGTALIKKYPKLESEFVYGDYKVYDVSEQEIGKATAKYFFYSNIMNFFKTEITLANGEIRKRPLIETNGETGEIVWDKGRDFATVRKVLSMPQVNIVKKTEVQTGGFSKESILPKRNSDKLIARKKDWDPKKYGGFDSPTVAYSVLVVAKVEKGKSKKLKSVKELLGLTIMERSSFEKNPIDFLEAKGYKEVKKDLIIKLPKYSLFELENGRKRMLASGELQKGNELALPSKYVNFLYLASHYEKLKGSPEDNEQKQLFVEQHKHYLDEIIEQISEFSKRVILADANLDKVLSAYNKHRDKPIREQAENIIHLFTLTNLGAPAAFKYFDTTIDRKRYTSTKEVLDATLIHQSITGLYETRIDLSQLGGD

SEQ ID NO: 24 - protein, 1358 aa, Streptococcus pyogenes
MDKKYSIGLDIGTNSVGWAVITDDYKVPSKKLKVLGNTDRHGIKKNLIGALLFDSGETAEATRLKRTARRRYTRRKNRICYLQEIFSNEMAKVDDSFFHRLEESFLVEEDKKHERHPIFGNIVDEVAYHEKYPTIYHLRKKLADSTDKVDLRLIYLALAHMIKFRGHFLIEGDLNPDNSDVDKLFIQLVQTYNQLFEENINASRVDAKAILSARLSKSRRLENLIAQLPGEKKNGLFGNLIALSLGLTPNFKSNFDLAEDAKLQLSKDTYDDDLDNLLAQIGDQYADLFLAAKNLSDAILLSDILRVNSEITKAPLSASMIKRYDEHHQDLTLLKALVRQQLPEKYKEIFFDQSKNGYAGYIDGGASQEEFYKFIKPILEKMDGTEELLAKLNREDLLRKQRTFDNGSIPYQIHLGELHAILRRQEDFYPFLKDNREKIEKILTFRIPYYVGPLARGNSRFAWMTRKSEETITPWNFEEVVDKGASAQSFIERMTNFDKNLPNEKVLPKHSLLYEYFTVYNELTKVKYVTEGMRKPAFLSGEQKKAIVDLLFKTNRKVTVKQLKEDYFKKIECFDSVEISGVEDRFNTSLGTYHDLLKIIKDKDFLDNEENEDILEDIVLTLTLFEDKEMIEERLKKYANLFDDKVMKQLKRRHYTGWGRLSRKLINGIRDKQSGKTILDFLKDGFANRNFMQLINDDSLTFKEAIQKAQVSGQGHSLHEQIANLAGSPAIKKGILQTVKIVDELVKVMGHKPENIVIEMARENQTTQKGQKNSRERMKRIEEGIKELGSQILKEHPVENTQLQNEKLYLYYLQNGRDMYVDQELDINRLSDYDVDHIVPQSFLKDDSIDNKVLTRSDKNRGKSDNVPSEEVVKKMKNYWRQLLNAKLITQRKFDNLTKAERGGLSELDKAGFIKRQLVETRQITKHVAQILDSRMNTKYDENDKLIREVKVITLKSKLVSDFRKDFQFYKVREINNYHHAHDAYLNAVVGTALIKKYPKLESEFVYGDYKVYDVSEQEIGKATAKYFFYSNIMNFFKTEITLANGEIRKRPLIETNGETGEIVWDKGRDFATVRKVLSMPQVNIVKKTEVQTGGFSKESILPKRNSDKLIARKKDWDPKKYGGFDSPTVAYSVLVVAKVEKGKSKKLKSVKELLGITIMERSSFEKNPIDFLEAKGYKEVRKDLIIKLPKYSLFELENGRKRMLASGELQKGNELALPSKYVNFLYLASHYEKLKGSPEDNEQKQLFVEQHKHYLDEIIEQISEFSKRVILADANLDKVLSAYNKHRDKPIREQAKNIIHLFTLTNLGAPAAFKYFDTTIERNRYKSIKEVLDATLIHQSITGLYETRIDLSQLGGD

SEQ ID NO: 25 - protein, 1358 aa, Streptococcus pyogenes
MDKKYSIGLDIGTNSVGWAVITDDYKVPSKKLKVLGNTDRHGIKKNLIGALLFDSGETAEATRLKRTARRRYTRRKNRICYLQEIFSNEMAKVDDSFFHRLEESFLVEEDKKHERHPIFGNIVDEVAYHEKYPTIYHLRKKLADSTDKVDLRLIYLALAHMIKFRGHFLIEGDLNPDNSDVDKLFIQLVQTYNQLFEENINASRVDAKAILSARLSKSRRLENLIAQLPGEKKNGLFGNLIALSLGLTPNFKSNFDLAEDAKLQLSKDTYDDDLDNLLAQIGDQYADLFLAAKNLSDAILLSDILRVNSEITKAPLSASMIKRYDEHHQDLTLLKALVRQQLPEKYKEIFFDQSKNGYAGYIDGGASQEEFYKFIKPILEKMDGTEELLAKLNREDLLRKQRTFDNGSIPYQIHLGELHAILRRQEDFYPFLKDNREKIEKILTFRIPYYVGPLARGNSRFAWMTRKSEETITPWNFEEVVDKGASAQSFIERMTNFDKNLPNEKVLPKHSLLYEYFTVYNELTKVKYVTEGMRKPAFLSGEQKKAIVDLLFKTNRKVTVKQLKEDYFKKIECFDSVEISGVEDRFNTSLGTYHDLLKIIKDKDFLDNEENEDILEDIVLTLTLFEDKEMIEERLKKYANLFDDKVMKQLKRRHYTGWGRLSRKLINGIRDKQSGKTILDFLKDGFANRNFMQLINDDSLTFKEAIQKAQVSGQGHSLHEQIANLAGSPAIKKGILQTVKIVDELVKVMGHKPENIVIEMARENQTTQKGQKNSRERMKRIEEGIKELGSQILKEHPVENTQLQNEKLYLYYLQNGRDMYVDQELDINRLSDYDVDHIVPQSFLKDDSIDNKVLTRSDKNRGKSDNVPSEEVVKKMKNYWRQLLNAKLITQRKFDNLTKAERGGLSELDKAGFIKRQLVETRQITKHVAQILDSRMNTKYDENDKLIREVKVITLKSKLVSDFRKDFQFYKVREINNYHHAHDAYLNAVVGTALIKKYPKLESEFVYGDYKVYDVSEQEIGKATAKYFFYSNIMNFFKTEITLANGEIRKRPLIETNGETGEIVWDKGRDFATVRKVLSMPQVNIVKKTEVQTGGFSKESILPKRNSDKLIARKKDWDPKKYGGFDSPTVAYSVLVVAKVEKGKSKKLKSVKELLGITIMERSSFEKNPIDFLEAKGYKEVRKDLIIKLPKYSLFELENGRKRMLASGELQKGNELALPSKYVNFLYLASHYEKLKGSPEDNEQKQLFVEQHKHYLDEIIEQISEFSKRVILADANLDKVLSAYNKHRDKPIREQAKNIIHLFTLTNLGAPAAFKYFDTTIERNRYKSIKEVLDATLIHQSITGLYEIRIDLSQLGGD

SEQ ID NO: 26 - protein, 1359 aa, Streptococcus pyogenes
MDKKYSIGLDIGTNSVGWAVITDDYKVPSKKFKVLGNTDRHSIKKNLIGALLFDSGETAEATRLKRTARRRYTRRKNRICYLQEIFSNEMAKVDDSFFHRLEESFLVEEDKKHERHPIFGNIVDEVAYHEKYPTIYHLRKKLVDSTDKADLRLIYLALAHMIKFRGHFLIEGDLNPDNSDVDKLFIQLVQTYNQLFEENINASGVDAKAILSARLSKSRRLENLIAQLPGEKKNGLFGNLIALSLGLTPNFKSNFDLAEDAKLQLSKDTYDDDLDNLLAQIGDQYADLFLAAKNLSDAILLSDILRVNTEITKASLSASMIKRYDEHHQDLTLLKALVRQQLPEKYKEIFFDQSKNGYAGYIDGGASQEEFYKFIKPILEKMDGTEELLVKLNREDLLRKQRTFDNGSIPHQIHLGELHAILRRQEDFYPFLKDNREKIEKILTFRIPYYVGPLARGNSRFAWMTRKSEETITPWNFEEVVDKGASAQSFIERMTNFDKNLPNEKVLPKHSLLYEYFTVYNELTKVKYVTEGMRKPAFLSGEQKKAIVDLLFKTNRKVTVKQLKEDYFKKIECFDSVEISGVEDRFNASLGTYHDLLKIIKDKDFLDNEENEDILEDIVLTLTLFEDREMIEERLKTYAHLFDDKVMKQLKRRRYTGWGRLSRKLINGIRDKQSGKTILDFLKDGFANRNFMQLIHDDSLTFKEDLQKAQVSGQGDSLHEHIANLAGSPAIKKGILQTVKVVDELVKVMGRHKPENIVIEMARENQTTQKGQKNSRERMKRIEEGIKELGSDILKEYPVENTQLQNEKLYLYYLQNGRDMYVDQELDINRLSDYDVDHIVPQSFIKDDSIDNKVLTRSDKNRGKSDNVPSEEVVKKMKNYWRQLLNAKLITQRKFDNLTKAERGGLSELDKAGFIKRQLVETRQITKHVAQILDSRMNTKYDENDKLIREVKVITLKSKLVSDFRKDFQFYKVREINNYHHAHDAYLNAVVGTALIKKYPKLESEFVYGDYKVYDVSEQEIGKATAKYFFYSNIMNFFKTEITLANGEIRKRPLIETNGETGEIVWDKGRDFATVRKVLSMPQVNIVKKTEVQTGGFSKESILPKRNSDKLIARKKDWDPKKYGGFDSPTVAYSVLVVAKVEKGKSKKLKSVKELLGITIMERSSFEKNPIDFLEAKGYKEVRKDLIIKLPKYSLFELENGRKRMLASGELQKGNELALPSKYVNFLYLASHYEKLKGSPEDNEQKQLFVEQHKHYLDEIIEQISEFSKRVILADANLDKVLSAYNKHRDKPIREQAENIIHLFTLTNLGAPAAFKYFDTTIGRNRYKSIKEVLDATLIHQSITGLYETRIDLSQLGGD

SEQ ID NO: 27 - protein, 1359 aa, Streptococcus pyogenes
MDKKYSIGLDIGTNSVGWAVITDDYKVPSKKFKVLGNTDRHGIKKNLIGALLFDSGETAEATRLKRTARRRYTRRKNRICYLQEIFSNEMAKVDDSFFHRLEESFLVEEDKKHERHPIFGNIVDEVAYHEKYPTIYHLRKKLADSTDKVDLRLIYLALAHMIKFRGHFLIEGDLNPDNSDVDKLFIQLVQTYNQLFEENINASRVDAKAILSARLSKSRRLENLIAQLPGEKKNGLFGNLIALSLGLTPNFKSNFDLAEDAKLQLSKDTYDDDLDNLLAQIGDQYADLFLAAKNLSDATLLSDILRVNSEITKAPLSASMIKRYDEHHQDLTLLKALVRQQLPEKYKEIFFDQSKNGYAGYIDGGASQEEFYKFIKPILEKMDGTEELLAKLNREDLLRKQRTFDNGSIPYQIHLGELHAILRRQEDFYPFLKDNREKIEKILTFRIPYYVGPLARGNSRFAWMTRKSEETITPWNFEEVVDKGASAQSFIERMTNFDKNLPNEKVLPKHSLLYEYFTVYNELTKVKYVTEGMRKPAFLSGEQKKAIVDLLFKTNRKVTVKQLKEDYFKKIECFDSVEISGVEDRFNASLGTYHDLLKIIKDKDFLDNEENEDILEDIVLTLTLFEDREMIEERLKTYAHLFDDKVMKQLKRRRYTGWGRLSRKLINGIRDKQSGKTILDFLKDGFANRNFMQLIHDDSLTFKEDIQKAQVSGQGDSLHEHIANLAGSPAIKKGILQTVKVVDELVKVMGRHKPENIVIEMARENQTTQKGQKNSRERMKRIEEGIKELGSDILKEYPVENTQLQNEKLYLYYLQNGRDMYVDQELDINRLSDYDVDHIVPQSFLKDDSIDNKVLTRSDKNRGKSDNVPSEEVVKKMKNYWRQLLNAKLITQRKFDNLTKAERGGLSELDKAGFIKRQLVETRQITKHVAQILDSRMNTKYDENDKLIREVKVITLKSKLVSDFRKDFQFYKVREINNYHHAHDAYLNAVVGTALIKKYPKLESEFVYGDYKVYDVSEQEIGKATAKYFFYSNIMNFFKTEITLANGEIRKRPLIETNGETGEIVWDKGRDFATVRKVLSMPQVNIVKKTEVQTGGFSKESILPKRNSDKLIARKKDWDPKKYGGFDSPTVAYSVLVVAKVEKGKSKKLKSVKELLGITIMERSSFEKNPIDFLEAKGYKEVRKDLIIKLPKYSLFELENGRKRMLASGELQKGNELALPSKYVNFLYLASHYEKLKGSPEDNEQKQLFVEQHKHYLDEIIEQISEFSKRVILADANLDKVLSAYNKHRDKPIREQAENIIHLFTLTNLGAPAAFKYFDTTIDRKRYTSTKEVLDATLIHQSITGLYETRIDLSQLGGD

SEQ ID NO: 28 - protein, 1359 aa, Streptococcus pyogenes
MDKKYSIGLDIGTNSVGWAVITDDYKVPSKKFKVLGNTDRHSIKKNLIGALLFDSGETAEATRLKRTARRRYTRRKNRICYLQEIFSNEMAKVDDSFFHRLEESFLVEEDKKHERHPIFGNIVDEVAYHEKYPTIYHLRKKLADSTDKADLRLIYLALAHMIKFRGHFLIEGDLNPDNSDVDKLFIQLVQTYNQLFEENINASRVDAKAILSARLSKSRRLENLIAQLPGEKRNGLFGNLIALSLGLTPNFKSNFDLAEDAKLQLSKDTYDDDLDNLLAQIGDQYADLFLAAKNLSDAILLSDILRVNSEITKAPLSASMIKRYDEHHQDLTLLKALVRQQLPEKYKEIFFDQSKNGYAGYIDGGASQEEFYKFIKPILEKMDGTEELLAKLNREDLLRKQRTFDNGSIPHQIHLGELHAILRRQEDFYPFLKDNREKIEKILTFRIPYYVGPLARGNSRFAWMTRKSEETITPWNFEEVVDKGASAQSFIERMTNFDKNLPNEKVLPKHSLLYEYFTVYNELTKVKYVTEGMRKPEFLSGEQKKAIVDLLFKTNRKVTVKQLKEDYFKKIECFDSVEISGVEDRFNASLGTYHDLLKIIKDKDFLDNEENEDILEDIVLTLTLFEDREMIEERLKTYAHLFDDKVMKQLKRRRYTGWGRLSRKLINGIRDKQSGKTILDFLKDGFANRNFMQLIHDDSLTFKEDIQKAQVSGQGDSLHEHIANLAGSPAIKKGILQTVKVVDELVKVMGRHKPENIVIEMARENQTTQKGQKNSRERMKRIEEGIKELGSDILKEYPVENTQLQNEKLYLYYLQNGRDMYVDQELDINRLSDYDVDHIVPQSFIKDDSIDNKVLTRSDKNRGKSDNVPSEEVVKKMKNYWKQLLNAKLITQRKFDNLTKAERGGLSELDKAGFIKRQLVETRQITKHVAQILDSRMNTKYDENDKLIREVKVITLKSKLVSDFRKDFQFYKVREINNYHHAHDAYLNAVVGTALIKKYPKLESEFVYGDYKVYDVSEQEIGKATAKYFFYSNIMNFFKTEITLANGEIRKRPLIETNGETGEIVWDKGRDFATVRKVLSMPQVNIVKKTEVQTGGFSKESILPKRNSDKLIARKKDWDPKKYGGFDSPTVAYSVLVVAKVEKGKSKKLKSVKELLGITIMERSSFEKNPIDFLEAKGYKEVRKDLIIKLPKYSLFELENGRKRMLASGELQKGNELALPSKYVNFLYLASHYEKLKGSPEDNEQKQLFVEQHKHYLDEIIEQISEFSKRVILADANLDKVLSAYNKHRDKPIREQAENIIHLFTLTNFGAPAAFIYFDTTIGRNRYKSIKEVLDATLIHQSITGLYETRIDLSQLGGD

SEQ ID NO: 29 - protein, 1359 aa, Streptococcus pyogenes
MDKKYSIGLDIGTNSVGWAVITDDYKVPSKKFKVLGNTDRHSIKKNLIGALLFDSGETAEATRLKRTARRRYTRRKNRICYLQEIFSNEIAKVDDSFFHRLEESFLVEEDKKHERHPIFGNIVDEVAYHEKYPTIYHLRKKLADSTDKADLRLIYLALAHMIKFRGHFLIEGDLNPDNSDVDKLFIQLVQTYNQLFEENINASRVDAKAILSARLSKSRRLENLIAQLPGEKRNGLFGNLIALSLGLTPNFKSNFDLAEDAKLQLSKDTYDDDLDNLLAQIGDQYADLFLAAKNLSDAILLSDILRVNTEITKAPLSASMIKRYDEHHQDLTLLKALVRQQLPEKYKEIFFDQSKNGYAGYIDGGASQEEFYKFIKPILEKMDGTEELLAKLNREDLLRKQRTFDNGSIPHQIHLGELHAILRRQEDFYPFLKDNREKIEKILTFRIPYYVGPLARGNSRFAWMTRKSEETITPWNFEEVVDKGASAQSFIERMTNFDKNLPNEKVLPKHSLLYEYFTVYNELTKVKYVTEGMRKPAFLSGEQKKAIVDLLFKTNRKVTVKQLKEDYFKKIECFDSVEISGVEDRFNASLGTYHDLLKIIKDKDFLDNEENEDILEDIVLTLTLFEDREMIEERLKTYAHLFDDKVMKQLKRRRYTGWGRLSRKLINGIRDKQSGKTILDFLKDGFANRNFMQLIHDDSLTFKEDLQKAQVSGQGDSLHEHIANLAGSPAIKKGILQTVKVVDELVKVMGRHKPENIVIEMARENQTTQKGQKNSRERMKRIEEGIKELGSDILKEYPVENTQLQNEKLYLYYLQNGRDMYVDQELDINRLSDYDVDHIVPQSFLKDDSIDNKVLTRSDKNRGKSDNVPSEEVVKKMKNYWKQLLNAKLITQRKFDNLTKAERGGLSELDKAGFIKRQLVETRQITKHVAQILDSRMNTKYDENDKLIREVRVITLKSKLVSDFRKDFQFYKVREINNYHHAHDAYLNAVVGTALIKKYPKLESEFVYGDYKVYDISEQEIGKATAKYFFYSNIMNFFKTEITLANGEIRKRPLIETNGETGEIVWDKGRDFATVRKVLSMPQVNIVKKTEVQTGGFSKESILPKRNSDKLIARKKDWDPKKYGGFDSPTVAYSVLVVAKVEKGKSKKLKSVKELVGITIMERSSFEKDPVDFLEAKGYKEVRKDLIIKLPKYSLFELENGRKRMLASGELQKGNELALPSKYVNFLYLASHYEKLKGSPEDNEQKQLFVEQHKHYLDEIIEQISEFSKRVILADANLDKVLSAYNKHRDKPIREQAENIIHLFTLTNLGAPAAFKYFDTTIGRNRYKSIKEVLDATLIHQSITGLYETRIDLSQLGGD

SEQ ID NO: 30 - protein, 1359 aa, Streptococcus pyogenes
MDKKYSIGLDIGTNSVGWAVITDDYKVPSKKFKVLGNTDRHSIKKNLIGALLFDSGETAEATRLKRTARRRYTRRKNRICYLQEIFSNEIAKVDDSFFHRLEESFLVEEDKKHERHPIFGNIVDEVAYHEKYPTIYHLRKKLADSTDKADLRLIYLALAHMIKFRGHFLIEGGLNPDNSDVDKLFIQLVQTYNQLFEENINASRVDAKAILSARLSKSRRLENLIAQLPGEKRNGLFGNLIALSLGLTPNFKSNFDLAEDAKLQLSKDTYDDDLDNLLAQIGDQYADLFLAAKNLSDAILLSDILRVNTEITKAPLSASMIKRYDEHHQDLTLLKALVRQQLPEKYKEIFFDQSKNGYAGYIDGGASQEEFYKFIKPILEKMDGTEELLAKLNREDLLRKQRTFDNGSIPHQIHLGELHAILRRQEDFYPFLKDNREKIEKILTFRIPYYVGPLARGNSRFAWMTRKSEETITPWNFEEVVDKGASAQSFIERMTNFDKNLPNEKVLPKHSLLYEYFTVYNELTKVKYVTEGMRKPAFLSGEQKKAIVDLLFKTNRKVTVKQLKEDYFKKIECFDSVEISGVEDRFNASLGTYHDLLKIIKDKDFLDNEENEDILEDIVLTLTLFEDREMIEERLKTYAHLFDDKVMKQLKRRRYTGWGRLSRKLINGIRDKQSGKTILDFLKDGFANRNFMQLIHDDSLTFKEDLQKAQVSGQGDSLHEHIANLAGSPAIKKGILQTVKVVDELVKVMGRHKPENIVIEMARENQTTQKGQKNSRERMKRIEEGIKELGSDILKEYPVENTQLQNEKLYLYYLQNGRDMYVDQELDINRLSDYDVDHIVPQSFLKDDSIDNKVLTRSDKNRGKSDNVPSEEVVKKMKNYWKQLLNAKLITQRKFDNLTKAERGGLSELDKAGFIKRQLVETRQITKHVAQILDSRMNTKYDENDKLIREVRVITLKSKLVSDFRKDFQFYKVREINNYHHAHDAYLNAVVGTALIKKYPKLESEFVYGDYKVYDISEQEIGKATAKYFFYSNIMNFFKTEITLANGEIRKRPLIETNGETGEIVWDKGRDFATVRKVLSMPQVNIVKKTEVQTGGFSKESILPKRNSDKLIARKKDWDPKKYGGFDSPTVAYSVLVVAKVEKGKSKKLKSVKELVGITIMERSSFEKDPVDFLEAKGYKEVRKDLIIKLPKYSLFELENGRKRMLASGELQKGNELALPSKYVNFLYLASHYEKLKGSPEDNEQKQLFVEQHKHYLDEIIEQISEFSKRVILADANLDKVLSAYNKHRDKPIREQAENIIHLFTLTNLGAPAAFKYFDTTIGRNRYKSIKEVLDATLIHQSITGLYETRIDLSQLGGD

SEQ ID NO: 31 - protein, 1359 aa, Streptococcus pyogenes
MDKKYSIGLDIGTNSVGWAVITDDYKVPSKKFKVLGNTDRHSIKKNLIGALLFDSGETAEATRLKRTARRRYTRRKNRICYLQEIFSNEMAKVDDSFFHRLEESFLVEEDKKHERHPIFGNIVDEVAYHEKYPTIYHLRKKLVDSTDKADLRLIYLALAHMIKFRGHFLIEGDLNPDNSDVDKLFIQLVQTYNQLFEENINANGVDAKAILSARLSKSRRLENLIAQLPGEKKNGLFGNLIALSLGLTPNFKSNFDLAEDAKLQLSKDTYDDDLDNLLAQIGDQYADLFLAAKNLSDAILLSDILRVNTEITKAPLSASMIKRYDEHHQDLTLLKALVRQQLPEKYKEIFFDQSKNGYAGYIDGGASQEEFYKFIKPILEKMDGTEELLVKLNREDLLRKQRTFDNGSIPHQIHLGELHAILRRQEDFYPFLKDNREKIEKILTFRIPYYVGPLARGNSRFAWMTRKSEETITPWNFEEVVDKGASAQSFIERMTNFDKNLPNEKVLPKHSLLYEYFTVYNELTKVKYVTEGMRKPAFLSGEQKKAIVDLLFKTNRKVTVKQLKEDYFKKIECFDSVEISGVEDRFNASLGTYHDLLKIIKDKDFLDNEENEDILEDIVLTLTLFEDREMIEERLKTYAHLFDDKVMKQLKRRRYTGWGRLSRKLINGIRDKQSGKTILDFLKDGFANRNFMQLIHDDSLTFKEDIQKAQVSGQGDSLHEHIANLAGSPAIKKGILQTVKVVDELVKVMGRHKPENIVIEMARENQTTQKGQKNSRERMKRIEEGIKELGSQILKEHPVENTQLQNEKLYLYYLQNGRDMYVDQELDINRLSDYDVDHIVPQSFLKDDSIDNKVLTRSDKNRGKSDNVPSEEVVKKMKNYWRQLLNAKLITQRKFDNLTKAERGGLSELDKAGFIKRQLVETRQITKHVAQILDSRMNTKYDENDKLIREVKVITLKSKLVSDFRKDFQFYKVREINNYHHAHDAYLNAVVGTALIKKYPKLESEFVYGDYKVYDVSEQEIGKATAKYFFYSNIMNFFKTEITLANGEIRKRPLIETNGETGEIVWDKGRDFATVRKVLSMPQVNIVKKTEVQTGGFSKESILPKRNSDKLIARKKDWDPKKYGGFDSPTVAYSVLVVAKVEKGKSKKLKSVKELLGITIMERSSFEKNPIDFLEAKGYKEVKKDLIIKLPKYSLFELENGRKRMLASGELQKGNELALPSKYVNFLYLASHYEKLKGSPEDNEQKQLFVEQHKHYLDEIIEQISEFSKRVILADANLDKVLSAYNKHRDKPIREQAENIIHLFTLTNLGAPAAFKYFDTTIDRKRYTSTKEVLDATLIHQSITGLYETRIDLSQLGGD

SEQ ID NO: 32 - protein, 1359 aa, Streptococcus pyogenes
MDKKYSIGLDIGTNSVGWAVITDDYKVPSKKFKVLGNTDRHSIKKNLIGALLFDSGETAEATRLKRTARRRYTRRKNRICYLQEIFSNEMAKVDDSFFHRLEESFLVEEDKKHERHPIFGNIVDEVAYHEKYPTIYHLRKKLADSTDKADLRLIYLALAHMIKFRGHFLIEGDLNPDNSDVDKLFIQLVQTYNQLFEENINASRVDAKAILSARLSKSRRLENLIAQLPGEKKNGLFGNLIALLLGLTPNFKSNFDLAEDAKLQLSKDTYDDDLDNLLAQIGDQYADLFLAAKNLSDAILLSDILRVNSEITKAPLSASMIKRYDEHHQDLTLLKALVRQQLPEKYKEIFFDQSKNGYAGYIDGGASQEEFYKFIKPILEKMDGTEELLAKLNREDLLRKQRTFDNGSIPHQIHLGELHAILRRQEDFYPFLKDNREKIEKILTFRIPYYVGPLARGNSRFAWMTRKSEETITPWNFEEVVDKGASAQSFIERMTNFDKNLPNEKVLPKHSLLYEYFTVYNELTKVKYVTEGMRKPAFLSGEQKKAIVDLLFKTNRKVTVKQLKEDYFKKIECFDSVEISGVEDRFNASLGTYHDLLKIIKDKDFLDNEENEDILEDIVLTLTLFEDKEMIEERLKKYAHLFDDKVMKQLKRRRYTGWGRLSRKLINGIRDKQSGKTILDFLKDGFANRNFMQLIHDDSLTFKEDIQKAQVSGQGDSLHEHIANLAGSPAIKKGILQTVKVVDELVKVMGRHKPENIVIEMARENQTTQKGQKNSRERMKRIEEGIKELGSDILKEYPVENTQLQNEKLYLYYLQNGRDMYVDQELDINRLSDYDVDHIVPQSFLKDDSIDNKVLTRSDKNRGKSDNVPSEEVVKKMKNYWKQLLNAKLITQRKFDNLTKAERGGLSELDKAGFIKRQLVETRQITKHVAQILDSRMNTKYDENDKLIREVRVITLKSKLVSDFRKDFQFYKVREINNYHHAHDAYLNAVVGTALIKKYPKLESEFVYGDYKVYDVSEQEIGKATAKYFFYSNIMNFFKTEITLANGEIRKRPLIETNGETGEIVWDKGRDFATVRKVLSMPQVNIVKKTEVQTGGFSKESILPKRNSDKLIARKKDWDPKKYGGFDSPTVAYSVLVVAKVEKGKSKKLKSVKELLGITIMERSSFEKNPIDFLEAKGYKEVRKDLIIKLPKYSLFELENGRKRMLASGELQKGNELALPSKYVNFLYLASHYEKLKGSPEDNEQKQLFVEQHKHYLDEIIEQISEFSKRVILADANLDKVLSAYNKHRDKPIREQAENIIHLFTLTNLGAPAAFKYFDTTIDRKRYTSTKEVLDATLIHQSITGLYETRIDLSQLGGD

SEQ ID NO: 33 - protein, 1359 aa, Streptococcus pyogenes
MDKKYSIGLDIGTNSVGWAVITDDYKVPSKKFKVLGNTDRHSIKKNLIGALLFDSGEIAEATRLKRTARRRYTRRKNRICYLQEIFSNEMAKVDDSFFHRLEESFLVEEDKKHERHPIFGNIVDEVAYHEKYPTIYHLRKKLVDSTDKADLRLIYLALAHMIKFRGHFLIEGDLNPDNSDVDKLFIQLVQTYNQLFEENINASGVDAKAILSARLSKSRRLENLIAQLPGEKKNGLFGNLIALSLGLTPNFKSNFDLAEDAKLQLSKDTYDDDLDNLLAQIGDQYADLFLAAKNLSDAILLSDILRLNSEITKAPLSASMIKRYDEHHQDLTLLKALVRQQLPEKYKEIFFDQSKNGYAGYIDGGASQEEFYKFIKPILEKMDGTEELLAKLNRKDLLRKQRTFDNGSIPHQIHLGELHAILRRQEDFYPFLKDNREKIEKILTFRIPYYVGPLARGNSRFAWMTRKSEETITPWNFEEVVDKGASAQSFIERMTNFDKNLPNEKVLPKHSLLYEYFTVYNELTKVKYVTEGMRKPAFLSGEQKKAIVDLLFKTNRKVTVKQLKEDYFKKIECFDSVEISGVEDRFNASLGTYHDLLKIIKDKDFLDNEENEDILEDIVLTLTLFEDREMIEERLKTYAHLFDDKVMKQLKRRRYTGWGRLSRKLINGIRDKQSGKTILDFLKDGFANRNFMQLIHDDSLTFKEDIQKAQVSGQGDSLHEHIANLAGSPAIKKGILQTVKVVDELVKVMGRHKPENIVIEMARENQTTQKGQKNSRERMKRIEEGIKELGSQILKEHPVENTQLQNEKLYLYYLQNGRDMYVDQELDINRLSDYDVDHIVPQSFIKDDSIDNKVLTRSDKNRGKSDNVPSEEVVKKMKNYWRQLLNAKLITQRKFDNLTKAERGGLSELDKAGFIKRQLVETRQITKHVAQILDSRMNTKYDENDKLIREVKVITLKSKLVSDFRKDFQFYKVREINNYHHAHDAYLNAVVGTALIKKYPKLESEFVYGDYKVYDVSEQEIGKATAKYFFYSNIMNFFKTEITLANGEIRKRPLIETNGETGEIVWDKGRDFATVRKVLSMPQVNIVKKTEVQTGGFSKESILPKRNSDKLIARKKDWDPKKYGGFDSPTVAYSVLVVAKVEKGKSKKLKSVKELLGITIMERSSFEKNPIDFLEAKGYKEVRKDLIIKLPKYSLFELENGRKRMLASGELQKGNELALPSKYVNFLYLASHYEKLKGSPEDNEQKQLFVEQHKHYLDEIIEQISEFSKRVILADANLDKVLSAYNKHRDKPIREQAENIIHLFTLTNLGAPTAFKYFDTTIDRKRYTSTKEVLDATFIHQSITGLYETRIDLSQLGGD

SEQ ID NO: 34 - protein, 1184 aa, Streptococcus pyogenes
PDNSDVDKLFIQLVQTYNQLFEENINASGVDAKAILSARLSKSRRLENLIAQLPGEKKNGLFGNLIALSLGLTPNFKSNFDLAEDAKLQLSKDTYDDDLDNLLAQIGDQYADLFLAAKNLSDAILLSDILRVNTEITKAPLSASMIKRYDEHHQDLTLLKALVRQQLPEKYKEIFFDQSKNGYAGYIDGGASQEEFYKFIKPILEKMDGTEELLVKLNREDLLRKQRTFDNGSIPHQIHLGELHAILRRQEDFYPFLKDNREKIEKILTFRIPYYVGPLARGNSRFAWMTRKSEETITPWNFEEVVDKGASAQSFIERMTNFDKNLPNEKVLPKHSLLYEYFTVYNELTKVKYVTEGMRKPAFLSGEQKKAIVDLLFKTNRKVTVKQLKEDYFKKIECFDSVEISGVEDRFNASLGTYHDLLKIIKDKDFLDNEENEDILEDIVLTLTLFEDREMIEERLKTYAHLFDDKVMKQLKRRRYTGWGRLSRKLINGIRDKQSGKTILDFLKDGFANRNFMQLIHDDSLTFKEDIQKAQVSGQGDSLHEHIANLAGSPAIKKGILQTVKVVDELVKVMGRHKPENIVIEMARENQTTQKGQKNSRERMKRIEEGIKELGSQILKEHPVENTQLQNEKLYLYYLQNGRDMYVDQELDINRLSDYDVDHIVPQSFLKDDSIDNKVLTRSDKNRGKSDNVPSEEVVKKMKNYWRQLLNAKLITQRKFDNLTKAERGGLSELDKAGFIKRQLVETRQITKHVAQILDSRMNTKYDENDKLIREVKVITLKSKLVSDFRKDFQFYKVREINNYHHAHDAYLNAVVGTALIKKYPKLESEFVYGDYKVYDVSEQEIGKATAKYFFYSNIMNFFKTEITLANGEIRKRPLIETNGETGEIVWDKGRDFATVRKVLSMPQVNIVKKTEVQTGGFSKESILPKRNSDKLIARKKDWDPKKYGGFDSPTVAYSVLVVAKVEKGKSKKLKSVKELLGITIMERSSFEKNPIDFLEAKGYKEVKKDLIIKLPKYSLFELENGRKRMLASGELQKGNELALPSKYVNFLYLASHYEKLKGSPEDNEQKQLFVEQHKHYLDEIIEQISEFSKRVILADANLDKVLSAYNKHRDKPIREQAENIIHLFTLTNLGAPAAFKYFDTTIDRKRYTSTKEVLDATLIHQSITGLYETRIDLSQLGGD

SEQ ID NO: 35 - protein, 1359 aa, Streptococcus pyogenes
MDKKYSIGLDIGTNSVGWAVITDDYKVPSKKFKVLGNTDRHSIKKNLIGALLFDSGETAEATRLKRTARRRYTRRKNRICYLQEIFSNEMAKVDDSFFHRLEESFLVEEDKKHERHPIFGNIVDEVAYHEKYPTIYHLRKKLADSTDKADLRLIYLALAHMIKFRGHFLIEGDLNPDNSDVDKLFIQLVQTYNQLFEENINASRVDAKAILSARLSKSRRLENLIAQLPGEKKNGLFGNLIALSLGLTPNFKSNFDLAEDAKLQLSKDTYDDDLDNLLAQIGDQYADLFLAAKNLSDATLLSDILRVNSEITKAPLSASMIKRYDEHHQDLTLLKALVRQQLPEKYKEIFFDQSKNGYAGYIDGGASQEEFYKFIKPILEKMDGTEELLAKLNREDLLRKQRTFDNGSIPHQIHLGELHAILRRQEDFYPFLKDNREKIEKILTFRIPYYVGPLARGNSRFAWMTRKSEETITPWNFEEVVDKGASAQSFIERMTNFDKNLPNEKVLPKHSLLYEYFTVYNELTKVKYVTEGMRKPAFLSGEQKKAIVDLLFKTNRKVTVKQLKEDYFKKIECFDSVEISGVEDRFNASLGTYHDLLKIIKDKDFLDNEENEDILEDIVLTLTLFEDREMIEERLKTYAHLFDDKVMKQLKRRRYTGWGRLSRKLINGIRDKQSGKTILDFLKDGFANRNFMQLIHDDSLTFKEDIQKAQVSGQGDSLHEHIANLAGSPAIKKGILQTVKVVDELVKVMGRHKPENIVIEMARENQTTQKGQKNSRERMKRIEEGIKELGSDILKEYPVENTQLQNEKLYLYYLQNGRDMYVDQELDINRLSDYDVDHIVPQSFLKDDSIDNKVLTRSDKNRGKSDNVPSEEVVKKMKNYWRQLLNAKLITQRKFDNLTKAERGGLSELDKAGFIKRQLVETRQITKHVAQILDSRMNTKYDENDKLIREVKVITLKSKLVSDFRKDFQFYKVREINNYHHAHDAYLNAVVGTALIKKYPKLESEFVYGDYKVYDVSEQEIGKATAKYFFYSNIMNFFKTEITLANGEIRKRPLIETNGETGEIVWDKGRDFATVRKVLSMPQVNIVKKTEVQTGGFSKESILPKRNSDKLIARKKDWDPKKYGGFDSPTVAYSVLVVAKVEKGKSKKLKSVKELLGITIMERSSFEKNPIDFLEAKGYKEVRKDLIIKLPKYSLFELENGRKRMLASGELQKGNELALPSKYVNFLYLASHYEKLKGSPEDNEQKQLFVEQHKHYLDEIIEQISEFSKRVILADANLDKVLSAYNKHRDKPIREQAENIIHLFTLTNLGAPAAFKYFDTTIDRKRYTSTKEVLDATLIHQSITGLYETRIDLSQLGGD

SEQ ID NO: 36 - protein, 1358 aa, Streptococcus pyogenes
MDKKYSIGLDIGTNSVGWAVITDDYKVPSKKFKVLGNTDRHSIKKNLIGALLFDSGETAEATRLKRTARRRYTRRKNRICYLQEIFSNEMAKVDDSFFHRLEESFLVEEDKKHERHPIFGNIVDEVAYHEKYPTIYHLRKKLADSTDKVDLRLIYLALAHMIKFRGHFLIEGDLNPDNSDVDKLFIQLVQTYNQLFEENINASRVDAKAILSARLSKSRRLENLIAQLPGEKKNGLFGNLIALSLGLTPNFKSNFDLAEDTKLQLSKDTYDDDLDNLLAQIGDQYADLFLAAKNLSDAILLSDILRVNSEITKAPLSASMIKRYDEHHQDLTLLKALVRQQLPEKYKEIFFDQSKNGYAGYIDGGASQEEFYKFIKPILEKMDGTEELLAKLNREDLLRKQRTFDNGSIPYQIHLGELHAILRRQEDFYPFLKDNREKIEKILTFRIPYYVGPLARGNSRFAWMTRKSEETITPWNFEEVVDKGASAQSFIERMTNFDKNLPNEKVLPKHSLLYEYFTVYNELTKVKYVTEGMRKPAFLSGEQKKAIVDLLFKTNRKVTVKQLKEDYFKKIECFDSVEISGVEDRFNTSLGTYHDLLKIIKDKDFLDNEENEDILEDIVLTLTLFEDKEMIEERLKKYANLFDDKVMKQLKRRHYTGWGRLSRKLINGIRDKQSGKTILDFLKDGFANRNFMQLINDDSLTFKEAIQKAQVSGQGHSLHEQIANLAGSPAIKKGILQTVKIVDELVKVMGHKPENIVIEMARENQTTQKGQKNSRERMKRIEEGIKELGSQILKEHPVENTQLQNEKLYLYYLQNGRDMYVDQELDINRLSDYDVDHIVPQSFLKDDSIDNKVLTRSDKNRGKSDNVPSEEVVKKMKNYWRQLLNAKLITQRKFDNLTKAERGGLSELDKAGFIKRQLVETRQITKHVAQILDSRMNTKYDENDKLIREVKVITLKSKLVSDFRKDFQFYKVREINNYHHAHDAYLNAVVGTALIKKYPKLESEFVYGDYKVYDVSEQEIGKATAKYFFYSNIMNFFKTEITLANGEIRKRPLIETNGETGEIVWDKGRDFATVRKVLSMPQVNIVKKTEVQTGGFSKESILPKRNSDKLIARKKDWDPKKYGGFDSPTVAYSVLVVAKVEKGKSKKLKSVKELLGITIMERSSFEKNPIDFLEAKGYKEVRKDLIIKLPKYSLFELENGRKRMLASGELQKGNELALPSKYVNFLYLASHYEKLKGSPEDNEQKQLFVEQHKHYLDEIIEQISEFSKRVILADANLDKVLSAYNKHRDKPIREQAKNIIHLFTLTNLGAPAAFKYFDTTIERNRYKSIKEVLDATLIHQSITGLYETRIDLSQLGGD

SEQ ID NO: 37 - protein, 1359 aa, Streptococcus pyogenes
MDKKYSIGLDIGTNSVGWAVITDDYKVPSKKFKVLGNTDRHSIKKNLIGALLFDSGETAEATRLKRTARRRYTRRKNRICYLQEIFSNEMAKVDDSFFHRLEESFLVEEDKKHERHPIFGNIVDEVAYHEKYPTIYHLRKKLADSTDKADLRLIYLALAHMIKFRGHFLIEGDLNPDNSDVDKLFIQLVQTYNQLFEENINASRVDAKAILSARLSKSRRLENLIAQLPGEKRNGLFGNLIALSLGLTPNFKSNFDLAEDAKLQLSKDTYDDDLDNLLAQIGDQYADLFLAAKNLSDAILLSDILRVNSEITKAPLSASMIKRYDEHHQDLTLLKALVRQQLPEKYKEIFFDQSKNGYAGYIDGGASQEEFYKFIKPILEKMDGTEELLAKLNREDLLRKQRTFDNGSIPHQIHLGELHAILRRQEDFYPFLKDNREKIEKILTFRIPYYVGPLARGNSRFAWMTRKSEETITPWNFEEVVDKGASAQSFIERMTNFDKNLPNEKVLPKHSLLYEYFTVYNELTKVKYVTEGMRKPAFLSGEQKKAIVDLLFKTNRKVTVKQLKEDYFKKIECFDSVEISGVEDRFNASLGTYHDLLKIIKDKDFLDNEENEDILEDIVLTLTLFEDREMIEERLKTYAHLFDDKVMKQLKRRRYTGWGRLSRKLINGIRDKQSGKTILDFLKDGFANRNFMQLIHDDSLTFKEDIQKAQVSGQGDSLHEHIANLAGSPAIKKGILQTVKIVDELVKVMGRHKPENIVIEMARENQTTQKGQKNSRERMKRIEEGIKELGSDILKEYPVENTQLQNEKLYLYYLQNGRDMYVDQELDINRLSDYDVDHIVPQSFLKDDSIDNKVLTRSDKNRGKSDNVPSEEVVKKMKNYWKQLLNAKLITQRKFDNLTKAERGGLSELDKAGFIKRQLVETRQITKHVAQILDSRMNTKYDENDKLIREVKVITLKSKLVSDFRKDFQFYKVREINNYHHAHDAYLNAVVGTALIKKYPKLESEFVYGDYKVYDVSEQEIGKATAKYFFYSNIMNFFKTEITLANGEIRKRPLIETNGETGEIVWDKGRDFATVRKVLSMPQVNIVKKTEVQTGGFSKESILPKRNSDKLIARKKDWDPKKYGGFDSPTVAYSVLVVAKVEKGKSKKLKSVKELLGITIMERSSFEKNPIDFLEAKGYKEVRKDLIIKLPKYSLFELENGRKRMLASGELQKGNELALPSKYVNFLYLASHYEKLKGSPEDNEQKQLFVEQHKHYLDEIIEQISEFSKRVILADANLDKVLSAYNKHRDKPIREQAENIIHLFTLTNLGAPAAFKYFDTTIGRNRYKSIKEVLDATLIHQSITGLYETRIDLSQLGGD

SEQ ID NO: 38 - protein, 1270 aa, Streptococcus pyogenes
MAKVDDSFFHRLEESFLVEEDKKHERHPIFGNIVDEVAYHEKYPTIYHLRKKLVDSTDKADLRLIYLALAHMIKFRGHFLIEGDLNPDNSDVDKLFIQLVQTYNQLFEENINASGVDAKAILSARLSKSRRLENLIAQLPGEKKNGLFGNLIALSLGLTPNFKSNFDLAEDAKLQLSKDTYDDDLDNLLAQIGDQYADLFLAAKNLSDAILLSDILRVNTEITKAPLSASMIKRYDEHHQDLTLLKALVRQQLPEKYKEIFFDQSKNGYAGYIDGGASQEEFYKFIKPILEKMDGTEELLVKLNREDLLRKQRTFDNGSIPHQIHLGELHAILRRQEDFYPFLKDNREKIEKILTFRIPYYVGPLARGNSRFAWMTRKSEETITPWNFEEVVDKGASAQSFIERMTNFDKNLPNEKVLPKHSLLYEYFTVYNELTKVKYVTEGMRKPAFLSGEQKKAIVDLLFKTNRKVTVKQLKEDYFKKIECFDSVEISGVEDRFNASLGTYHDLLKIIKDKDFLDNEENEDILEDIVLTLTLFEDREMIEERLKTYAHLFDDKVMKQLKRRRYTGWGRLSRKLINGIRDKQSGKTILDFLKDGFANRNFMQLIHDDSLTFKEDIQKAQVSGQGDSLHEHIANLAGSPAIKKGILQTVKVVDELVKVMGRHKPENIVIEMARENQTTQKGQKNSRERMKRIEEGIKELGSQILKEHPVENTQLQNEKLYLYYLQNGRDMYVDQELDINRLSDYDVDHIVPQSFLKDDSIDNKVLTRSDKNRGKSDNVPSEEVVKKMKNYWRQLLNAKLITQRKFDNLTKAERGGLSELDKAGFIKRQLVETRQITKHVAQILDSRMNTKYDENDKLIREVKVITLKSKLVSDFRKDFQFYKVREINNYHHAHDAYLNAVVGTALIKKYPKLESEFVYGDYKVYDVSEQEIGKATAKYFFYSNIMNFFKTEITLANGEIRKRPLIETNGETGEIVWDKGRDFATVRKVLSMPQVNIVKKTEVQTGGFSKESILPKRNSDKLIARKKDWDPKKYGGFDSPTVAYSVLVVAKVEKGKSKKLKSVKELLGITIMERSSFEKNPIDFLEAKGYKEVKKDLIIKLPKYSLFELENGRKRMLASGELQKGNELALPSKYVNFLYLASHYEKLKGSPEDNEQKQLFVEQHKHYLDEIIEQISEFSKRVILADANLDKVLSAYNKHRDKPIREQAENIIHLFTLTNLGAPAAFKYFDTTIDRKRYTSTKEVLDATLIHQSITGLYETRIDLSQLGGD

SEQ ID NO: 39 - protein, 536 aa, Streptococcus pyogenes
QELDINRLSGYDVDHIVPQSFLKDDSIDNKVLTRSDKNRGKSDNVPSEEVVKKMKNYWRQLLNAKLITQRKFDNLTKAERGGLSELDKVGFIKRQLVETRQITKHVAQILDSRMNTKYDENDKLIREVRVITLKSKLVSDFRKDFQFYKVREINNYHHAHDAYLNAVVGTALIKKYPKLESEFVYGDYKVYDVSEQEIGKATAKYFFYSNIMNFFKTEITLANGEIRKRPLIETNGETGEIVWDKGRDFATVRKVLSMPQVNIVKKTEVQTGGFSKESILPKRNSDKLIARKKDWDPKKYGGFDSPTVAYSVLVVAKVEKGKSKKLKSVKELLGITIMERSSFEKDPIDFLEAKGYKEVRKDLIIKLPKYSLFELENGRKRMLASGELQKGNELALPSKYVNFLYLASHYEKLKGSPEDNEQKQLFVEQHKHYLDEIIEQISEFSKRVILADANLDKVLSAYNKHRDKPIREQAENIIHLFTLTNLGAPAAFKYFDTTIDRKRYTSTKEVLDATLIHQSITGLYETRIDLSQLGGD

SEQ ID NO: 40 - protein, 305 aa, Streptococcus pyogenes
IETNGETGEIVWDKGRDFATVRKVLSMPQVNIVKKTEVQTGGFSKESILPKRNSDKLIARKKDWDPKKYGGFDSPTVAYSVLVVAKVEKGKSKKLKSVKELLGITIMERSSFEKDPIDFLEAKGYKEVRKDLIIKLPKYSLFELENGRKRMLASGELQKGNELALPSKYVNFLYLASHYEKLKGSPEDNEQKQLFVEQHKHYLDEIIEQISEFSKRVILADANLDKVLSAYNKHRDKPIREQAENIIHLFTLTNLGAPAAFKYFDTTIDRKRYTSTKEVLDATLIHQSITGLYETRIDLSQLGGD

SEQ ID NO: 41 - protein, 1359 aa, Artificial Sequence
  Synthetic Polypeptide
MDKKYSIGLDIGTNSVGWAVITDDYKVPSKKFKVLGNTDRHSIKKNLIGALLFDSGEIAEATRLKRTARRRYTRRKNRICYLQEIFSNEMAKVDDSFFHRLEESFLVEEDKKHERHPIFGNIVDEVAYHEKYPTIYHLRKKLVDSTDKADLRLIYLALAHMIKFRGHFLIEGDLNPDNSDVDKLFIQLVQTYNQLFEENINASGVDAKAILSARLSKSRRLENLIAQLPGEKKNGLFGNLIALSLGLTPNFKSNFDLAEDAKLQLSKDTYDDDLDNLLAQIGDQYADLFLAAKNLSDAILLSDILRLNSEITKAPLSASMIKRYDEHHQDLTLLKALVRQQLPEKYKEIFFDQSKNGYAGYIDGGASQEEFYKFIKPILEKMDGTEELLAKLNREDLLRKQRTFDNGSIPHQIHLGELHAILRRQEDFYPFLKDNREKIEKILTFRIPYYVGPLARGNSRFAWMTRKSEETITPWNFEEVVDKGASAQSFIERMTNFDKNLPNEKVLPKHSLLYEYFTVYNELTKVKYVTEGMRKPAFLSGEQKKAIVDLLFKTNRKVTVKQLKEDYFKKIECFDSVEISGVEDRFNASLGTYHDLLKIIKDKDFLDNEENEDILEDIVLTLTLFEDREMIEERLKTYAHLFDDKVMKQLKRRRYTGWGRLSRKLINGIRDKQSGKTILDFLKDGFANRNFMQLIHDDSLTFKEDIQKAQVSGQGDSLHEHIANLAGSPAIKKGILQTVKVVDELVKVMGRHKPENIVIEMARENQTTQKGQKNSRERMKRIEEGIKELGSQILKEHPVENTQLQNEKLYLYYLQNGRDMYVDQELDINRLSDYDVDHIVPQSFIKDDSIDNKVLTRSDKNRGKSDNVPSEEVVKKMKNYWRQLLNAKLITQRKFDNLTKAERGGLSELDKAGFIKRQLVETRQITKHVAQILDSRMNTKYDENDKLIREVKVITLKSKLVSDFRKDFQFYKVREINNYHHAHDAYLNAVVGTALIKKYPKLESEFVYGDYKVYDVSEQEIGKATAKYFFYSNIMNFFKTEITLANGEIRKRPLIETNGETGEIVWDKGRDFATVRKVLSMPQVNIVKKTEVQTGGFSKESILPKRNSDKLIARKKDWDPKKYGGFDSPTVAYSVLVVAKVEKGKSKKLKSVKELLGITIMERSSFEKNPIDFLEAKGYKEVRKDLIIKLPKYSLFELENGRKRMLASGELQKGNELALPSKYVNFLYLASHYEKLKGSPEDNEQKQLFVEQHKHYLDEIIEQISEFSKRVILADANLDKVLSAYNKHRDKPIREQAENIIHLFTLTNLGAPTAFKYFDTTIDRKRYTSTKEVLDATFIHQSITGLYETRIDLSQLGGD

SEQ ID NO: 42 - protein, 1341 aa, Artificial Sequence
  Synthetic Polypeptide
MDQKYSIGLDIGTNSVGWAVVTDDYKVPAKKMKVLGNTDKQSIKKNLLGALLFDSGETAEATRLKRTARRRYTRRRNRLRYLQEIFAEEMNKVDENFFQRLDDSFLVDEDKRGERHPIFGNIAAEVKYHDDFPTIYHLRKHLADISQKADLRLVYLALAHMIKFRGHFLIEGQLKAENTNVQALFKDFVEVYDKTVEESHLSEMTVDALSILTEKVSKSRRLENLIAHYPAEKKNTLFGNLIALSLGLQPNFKTNFQLSEDAKLQFSKDTYEEDLEGLLGEIGDEYADLFASAKNLYDAILLSGILTVDDNSTKAPLSASMVKRYEEHQKDLKKLKDFIKVNAPDQYNAIFKDKNKKGYAGYIENGVKQDEFYKYLKGILLQINGSGDFLDKIDREDFLRKQRTFDNGSIPHQIHLQEMHAILRRQEEHYPFLKENQDKIEKILTFRIPYYVGPLARKGSRFAWAEYKADEKITPWNFDDILDKEKSAEKFITRMTLNDLYLPEEKVLPKHSLLYETFTVYNELTKVKYVNEQGEAKFFDANMKQEIFDHVFKENRKVTKDKLLNYLNKEFEEFRIVNLTGLDKENKAFNSSLGTYHDLRKILDKSFLDDKANEKTIEDIIQTLTLFEDREMIRQRLQKYSDIFTKAQLKKLERRHYTGWGRLSYKLINGIRNKENKKTILDYLIDDGYANRNFMQLINDDALSFKEEIARAQIIGDVDDIANVVHDLPGSPAIKKGILQSVKIVDELVKVMGHNPANIIIEMARENQMTDKGRRNSQQRLKLLQDSLKPVNIKNVENQQLQNDRLFLYYIQNGKDMYTGETLDINNLSQYDIDHIIPQAFIKDNSLDNRVLTRSDKNRGKSDDVPSIEVVHEMKSFWSKLLSVKLITQRKFDNLTKAERGGLTEEDKAGFIKRQLVETRQITKHVAQILDERFNTEFDGNKRRIRNVKIITLKSNLVSNFRKEFELYKVREINDYHHAHDAYLNAVVGNALLLKYPQLEPEFVYGEYPKYNSYRSRKSATEKFLFYSNILRFFKKEDIQTNEDGEIAWNKEKHIKILRKVLSYPQVNIVKKTEEQTGGFSKESILPKGESDKLIPRKTKNSYWNPKKYGGFDSPVVAYSILVFADVEKGKSKKLRKVQDMVGITIMEKKRFEKHPVDFLEQRGYRNVRLEKIIKLPKYSLFELENKRRRLLASARELQKGNELVIPQRFTTLLYHSYQIEKNYEPEHREYVEKHKDEFKELLEYISVFSRKYVLADNNLTKIEMLFSKNKDAEVSSLAKSFISLLTFTAFGAPAAFNFFGENIDRKRYTSVTECLNATLIHQSITGLYETRIDLSKLGED

SEQ ID NO: 43 - protein, 1356 aa, Artificial Sequence
  Synthetic Polypeptide
MTKKNYSIGLDIGTNSVGWAVITDDYKVPAKKMKVLGNTDKKYIKKNLLGALLFDSGETAEATRLKRTARRRYTRRKNRLRYLQEIFAEEMTKVDESFFQRLDESFLRWDDDNKKLGRYPIFGNKADVVKYHQEFPTIYHLRKHLADSSEKADLRLVYLALAHMIKFRGHFLIEGELNAENTDVQKIFADFVGVYDRTFDDSHLSEITVDAASILTEKISKSRRLENLIKYYPTEKKNTLFGNLIALALGLQPNFKMNFKLSEDAKLQFSKDSYEEDLGELLGKIGDDYADLFTSAKNLYDAILLSGILIVDDNSTKAPLSASMIKRYVEHQEDLEKLKEFIKANKSELYHDIFKDKNKNGYAGYIENGVKQDEFYKYLKNTLSKIAGSDYFLDKIEREDFLRKQRTFDNGSIPHQIHLQEMHAILRRQGDYYPFLKENQDRIEKILTFRIPYYVGPLARKDSRFSWAEYHSDEKITPWNFDKVIDKEKSAEKFITRMTLNDLYLPEEKVLPKHSHVYETYAVYNELTKIKYVNEQGKDSFFDSNMKQEIFDHVFKENRKVTKEKLLNYLNKEFPEYRIKDLIGLDKENKSFNASLGTYHDLKKILDKAFLDDKVNEEVIEDIIKTLTLFEDKDMIHERLQKYSDIFTADQLKKLERRHYTGWGRLSYKLINGIRNKENNKTILDYLIDDGSANRNFMQLINDDTLPFKQIIQKSQVVGDVDDIEAVVHDLPGSPAIKKGILQSVKIVDELVKVMGDNPDNIVIEMARENQTTNRGRSQSQQRLKKLQNSLKPSYIEDKVENSHLQNDQLFLYYIQNGKDMYTGDELDIDHLSDYDIDHIIPQAFIKDDSIDNRVLTSSAKNRGKSDDVPSLDIVRARKAEWVRLYKSGLISKRKFDNLTKAERGGLTEADKAGFIKRQLVETRQITKHVAQILDARFNTESDENDKVIRDVKVITLKSNLVSQFRKDFEFYKVREINDYHHAHDAYLNAVVGTALLKKYPKLASEFVYGEYKKYDISSDKATAKYFFYSNLMNFFKRVIRYSNGKVIVRPVVEYSKDTEDIAWDKKSNFRTICKVLSYPQVNIVKKVETQTGGFSKESILPKGDSDKLIPRKTKKAYWDTKKYGGFDSPTVAYSVFVVADVEKGKAKKLKTVKELVGISIMERSFFEENPVEFLENKGYHNIREDKLIKLPKYSLFEFEGGKRRLLASASELQKGNEMVIPGHLVKLLYHAQRINSFNSTKYLDYVSAHKKEFEKVLSCVEDFANLYVDVEKNLSKIRAVADSMDNFSIEEISNSFINLLTLTALGAPADFNFLGEKIPRKRYTSTKECLNATLIHQSITGLYETRIDLSKIGEE

SEQ ID NO: 44 - protein, 1365 aa, Streptococcus agalactiae
MNKPYSIGLDIGTNSVGWSIITDDYKVPAKKIRVLGNTDKEYIKKNLIGALLFDGGNTAADRRLKRTARRRYTRRRNRILYLQEIFAEEMSKVDDSFFHRLEDSFLVEEDKRGSKYPIFATLQEEKYYHEKFPTIYHLRKELADKKEKADLRLVYLALAHIIKFRGHFLIEDDRFDVRNTDIQKQYQAFLEIFDTTFENNDLLSQDVDVEAILTDKISKSAKKDRILAQYPNQKSTGIFAEFLKLIVGNQADFKKHFNLEDKTPLQFAKDSYDEDLENLLGQIGDEFADLFSAAKKLYDSVLLSGILTVTDLSTKAPLSASMIQRYDEHREDLKQLKQFVKASLPEKYQEIVADSSKDGYAGYIEGKTNQEAFYKYLSKLLTKQEGSEYFLEKIKNEDFLRKQRTFDNGSIPHQVHLTELRAIIRRQSEYYPFLKENLDRIEKILTFRIPYYVGPLAREKSDFAWMTRKTDDSIRPWNFEDLVDKEKSAEAFIHRMTNNDLYLPEEKVLPKHSLIYEKFTVYNELTKVRFLAEGFKDFQFLNRKQKETIFNSLFKEKRKVTEKDIISFLNKVDGYEGIAIKGIEKQFNASLSTYHDLKKILGKDFLDNTDNELILEDIVQTLTLFEDREMIKKRLDIYKDFFTESQLKKLYRRHYTGWGRLSAKLINGIRNKENQKTILDYLIDDGSANRNFMQLIKDAGLSFKPIIDKARTGSHSDNLKEVIGELAGSPAIKKGILQSLKIVDELVKVMGYEPEQIVVEMARENQTTAKGLSRSRQRLTTLRESLANLKSEKKPKYVKDQVENHHLSDDRLFLYYLQNGKDMYTDDELDIDNLSQYDIDHIIPQAFIKDDSIDNRVLVSSAKNRGKSDDVPSLEIVKDCKVFWKKLLDAKLMSQRKYDNLTKAERGGLTSDDKARFIQRQLVETRQITKHVARILDERFNNELDSKGRRIRKVKIVTLKSNLVSNFRKEFVFYKIREVNNYHHAHDAYLNAVVAKAILTKYPQLEPEFVYGDYPKYNSYKTRKATEKLFFYSNIMNFFKTKVTLADGTVVVKDDIEVNNDTGEIVWDKKKHFATVRKVLSYPQVNIVKKTEIQTGGFSKESILAHGNSDKLIPRKTKDIYLDPKKYGGFDSPIVAYSVLVVADIKKGKAQKLKTVTELLGITIMERSRFEKNPSAFLESKGYLNIRTDKLIILPKYSLFELENGRRRLLASAGELQKGNELALPTQFMKFLYLASRYNESKGKPEEIEKKQEFVNQHVSYFDDIFQIINDFSKRVILADANLEKINRLYQDNKENIPVDELANNIINLFTFTSLGAPAAFKFFDKIVDRKRYTSTKEVLNSTLIHQSITGLYETRIDLGKLGED

SEQ ID NO: 45 - protein, 1365 aa, Streptococcus agalactiae
MNKPYSIGLDIGTNSVGWSIITDDYKVPAKKMRVLGNTDKEYIKKNLIGALLFDGGNTAADRRLKRTARRRYTRRRNRILYLQEIFAEEMSKVDDSFFHRLEDSFLVEEDKRGSKYPIFATLQEEKDYHEKFPTIYHLRKELADKQEKADLRLIYLALAHIIKFRGHFLIEDDRFDVRNTDIQKQYQAFLEIFDTTFENNHLLSQNVDVEAILTDKISKSAKKDRILAQYPNQKSTGIFAEFLKLIVGNQADFKKHFNLEDKTPLQFAKDSYDEDLENLLGQIGDEFADLFSAAKKLYDSVLLSGILTVIDLSTKAPLSASMIQRYDEHREDLKQLKQFVKASLPEKYQEIFADSSKDGYAGYIEGKTNQEAFYKYLSKLLTKQEDSENFLEKIKNEDFLRKQRTFDNGSIPHQVHLTELKAIIRRQSEYYPFLKENQDRIEKILTFRIPYYIGPLAREKSDFAWMTRKTDDSIRPWNFEDLVDKEKSAEAFIHRMTNNDFYLPEEKVLPKHSLIYEKFTVYNELTKVRYKNEQGETYFFDSNIKQEIFDGVFKEHRKVSKKKLLDFLAKEYEEFRIVDVIGLDKENKAFNASLGTYHDLEKILDKDFLDNPDNESILEDIVQTLTLFEDREMIKKRLENYKDLFTESQLKKLYRRHYTGWGRLSAKLINGIRDKESQKTILDYLIDDGRSNRNFMQLINDDGLSFKSIISKAQAGSHSDNLKEVVGELAGSPAIKKGILQSLKIVDELVKVMGYEPEQIVVEMARENQTTNQGRRNSRQRYKLLDDGVKNLASNILKEYPTDNQALQNERLFLYYLQNGRDMYTGEALDIDNLSQYDIDHIIPQAFIKDDSIDNRVLVSSAKNRGKSDDVPSLEIVKDCKVFWKKLLDAKLMSQRKYDNLTKAERGGLTSDDKARFIQRQLVETRQITKHVARILDERFNNELDSKGRRIRKVKIVTLKSNLVSNFRKEFGFYKIREVNDYHHAHDAYLNAVVAKAILTKYPQLEPEFVYGLYRRKKLSKIVRATRKMFFYSNLMNMFKRVVRLADGSIVVRPVIETGRYMGKTAWDKKKHFATVRKVLSYPQVNIVKKTEIQTGGFSKESILAHGNSDKLIPRKTKDIYLDPKKYGGFDSPIVAYSVLVVADIKKGKAQKLKTVTELLGITIMERSKFEKNPSAFLESKGYLNIRDDKLMILPKYSLFELENGRRRLLASAGELQKGNELALPTQFMKFLYLASRYNESKGKPEEIEKKQEFVNQHVSYFDDILQLINDFSKRVILADANLEKINKLYQDNKENISVDELANNIINLFTFTSLGAPAAFKFFDKIVDRKRYTSTKEVLNSTLIHQSITGLYETRIDLSKLGED

SEQ ID NO: 46 - protein, 1365 aa, Streptococcus agalactiae
MNKPYSIGLDIGTNSVGWSIITDDYKVPAKKMRVLGNTDKEYIKKNLIGALLFDGGNTAADRRLKRTARRRYTRRRNRILYLQEIFAEEMSKVDDSFFHRLEDSFLVEEDKRGSKYPIFATLQEEKDYHEKFSTIYHLRKELADKKEKADLRLIYIALAHIIKFRGHFLIEDDSFDVRNTDISKQYQDFLEIFNITFENNDLLSQNVDVEAILTDKISKSAKKDRILAQYPNQKSTGIFAEFLKLIVGNQADFKKYFNLEDKTPLQFAKDSYDEDLENLLGQIGDEFADLFSAAKKLYDSVLLSGILTVIDLSTKAPLSASMIQRYDEHREDLKQLKQFVKASLPEKYQEIFADSSKDGYAGYIEGKTNQEAFYKYLSKLLTKQEDSENFLEKIKNEDFLRKQRTFDNGSIPHQVHLTELKAIIRRQSEYYPFLKENQDRIEKILTFRIPYYIGPLAREKSDFAWMTRKTDDSIRPWNFEDLVDKEKSAEAFIHRMTNNDFYLPEEKVLPKHSLIYEKFTVYNELTKVRYKNEQGETYFFDSNIKQEIFDGVFKEHRKVSKKKLLDFLAKEYEEFRIVDVIGLDKENKAFNASLGTYHDLEKILDKDFLDNPDNESILEDIVQTLTLFEDREMIKKRLENYKDLFTESQLKKLYRRHYTGWGRLSAKLINGIRDKESQKTILDYLIDDGRSNRNFMQLINDDGLSFKSIISKAQAGSHSDNLKEVVGELAGSPAIKKGILQSLKIVDELVKVMGYEPEQIVVEMARENQTTNQGRRNSRQRYKLLDDGVKNLASNILKEYPTDNQALQNERLFLYYLQNGRDMYTGEALDIDNLSQYDIDHIIPQAFIKDDSIDNRVLVSSAKNRGKSDDVPSLEIVKDCKVFWKKLLDAKLMSQRKYDNLTKAERGGLTSDDKARFIQRQLVETRQITKHVARILDERFNNELDSKGRRIRKVKIVTLKSNLVSNFRKEFGFYKIREVNNYHHAHDAYLNAVVAKAILTKYPQLEPEFVYGDYPKYNSYKTRKATEKLFFYSNIMNFFKTKVTLADGTVVVKDDIEVNNDTGEIVWDKKKHFATVRKVLSYPQNNIVKKTEIQTGGFSKESILAHGNSDKLIPRKTKDIYLDPKKYGGFDSPIVAYSVLVVADIKKGKAQKLKTVTELLGITIMERSRFEKNPSAFLESKGYLNIRADKLIILPKYSLFELENGRRRLLASAGELQKGNELALPTQFMKFLYLASRYNESKGKPEEIEKKQEFVNQHVSYFDDILQLINDFSKRVILADANLEKINKLYQDNKENISVDELANNIINLFTFTSLGAPAAFKFFDKIVDRKRYTSTKEVLNSTLIHQSITGLYETRIDLGKLGED

SEQ ID NO: 47 - protein, 1369 aa, Streptococcus agalactiae
MNKPYSIGLDIGTNSVGWSIITDDYKVPAKKMRVLGNTDKEYIKKNLIGALLFDGGNTAADRRLKRTARRRYTRRRNRILYLQEIFAEEMSKVDDSFFHRLEDSFLVEEDKRGSKYPIFATLQEEKDYHEKFSTIYHLRKELADKKEKADLRLIYIALAHIIKFRGHFLIEDDSFDVRNTDISKQYQDFLEIFNTIFENNDLLSQNVDVEAILTDKISKSAKKDRILAQYPNQKSTGIFAEFLKLIVGNQADFKKYFNLEDKTPLQFAKDSYDEDLENLLGQIGDEFADLFSAAKKLYDSVLLSGILTVIDLSTKAPLSASMIQRYDEHREDLKQLKQFVKASLPEKYQEIFADSSKDGYAGYIEGKTNQEAFYKYLSKLLTKQEDSENFLEKIKNEDFLRKQRTFDNGSIPHQVHLTELKAIIRRQSEYYPFLKENQDRIEKILTFRIPYYIGPLAREKSDFAWMTRKTDDSIRPWNFEDLVDKEKSAEAFIHRMTNNDFYLPEEKVLPKHSLIYEKFTVYNELTKVRYKNEQGETYFFDSNIKQEIFDGVFKEHRKVSKKKLLDFLAKEYEEFRIVDVIGLDKENKAFNASLGTYHDLEKILDKDFLDNPDNESILEDIVQTLTLFEDREMIKKRLENYKDLFTESQLKKLYRRHYTGWGRLSAKLINGIRDKESQKTILDYLIDDGRSNRNFMQLINDDGLSFKSIISKAQAGSHSDNLKEVVGELAGSPAIKKGILQSLKIVDELVKVMGYEPEQIVVEMARENQTTNQGRRNSRQRYKLLDDGVKNLASNILKEYPTDNQALQNERLFLYYLQNGRDMYTGEALDIDNLSQYDIDHIIPQAFIKDDSIDNRVLVSSAKNRGKSDDVPSLEIVKDCKVFWKKLLDAKLMSQRKYDNLTKAERGGLTSDDKARFIQRQLVETRQITKHVARILDERFNNELDSKGRRIRKVKIVTLKSNLVSNFRKEFGFYKIREVNNYHHAHDAYLNAVVAKAILTKYPQLEPEFVYGDYPKYNSYKTRKATEKLFFYSNIMNFFKTKVTLADGTVVVKDDIEVNNDTGEIVWDKKKHFATVRKVLSYPQNNIVKKTEIQTGGFSKESILAHGNSDKLIPRKTKDIYLDPKKYGGFDSPIVAYSVLVVADIKKGKAQKLKTVTELLGITIMERSRFEKNPSAFLESKGYLNIRADKLIILPKYSLFELENGRRRLLASAGETIDRLQKGNELALPTQFMKFLYLASRYNESKGKPEEIEKKQEFVNQHVSYFDDILQLINDFSKRVILADANLEKINKLYQDNKENISVDELANNIINLFTFTSLGAPAAFKFFDKIVDRKRYTSTKEVLNSTLIHQSITGLYETRIDLGKLGED

SEQ ID NO: 48 - protein, 1363 aa, Streptococcus agalactiae
MNKPYSIGLDIGTNSVGWSIITDDYKVPAKKMRVLGNTDKEYIKKNLIGALLFDGGNTAADRRLKRTARRRYTRRRNRILYLQEIFAEEMSKVDDSFFHRLEDSFLVEEDKRGSKYPIFATLQEEKDYHEKFSTIYHLRKELADKKEKADLRLIYIALAHIIKFRGHFLIEDDSFDVRNTDISKQYQDFLEIFNTTFENNDLLSQNVDVEAILTDKISKSAKKDRILAQYPNQKSTGIFAEFLKLIVGNQADFKKYFNLEDKTPLQFAKDSYDEDLENLLGQIGDEFADLFSAAKKLYDSVLLSGILTVIDLSTKAPLSASMIQRYDEHREDLKQLKQFVKASLPEKYQEIFADSSKDGYAGYIEGKTNQEAFYKYLSKLLTKQEDSENFLEKIKNEDFLRKQRTFDNGSIPHQVHLTELKAIIRRQSEYYPFLKENQDRIEKILTFRIPYYIGPLAREKSDFAWMTRKTDDSIRPWNFEDLVDKEKSAEAFIHRMTNNDFYLPEEKVLPKHSLIYEKFTVYNELTKVRYKNEQGETYFFDSNIKQEIFDGVFKEHRKVSKKKLLDFLAKEYEEFRIVDVIGLDKENKAFNASLGTYHDLEKILDKDFLDNPDNESILEDIIQTLTLFEDREMIKKRLENYKDLFTESQLKKLYRRHYTGWGRLSAKLINGIRDKESQKTILDYLIDDGRSNRNFMQLINDDGLSFKSIISKAQAGSHSDNLKEVVGELAGSPAIKKGILQSLKIVDELVKVMGYEPEQIVVEMARENQTTNQGRRNSRQRYKLLDDGVKNLASNILKEYPTDNQALQNERLFLYYLQNGRDMYTGEALDIDNLSQYDIDHIIPQAFIKDDSIDNRVLVSSAKNRGKSDDVPSLEIVKDCKVFWKKLLDAKLMSQRKYDNLTKAERGGLTSKARFIQRQLVETRQITKHVARILDERFNNELDSKGRRIRKVKIVTLKSNLVSNFRKEFGFYKIREVNNYHHAHDAYLNAVVAKAILTKYPQLEPEFVYGDYPKYNSYKTRKATEKLFFYSNIMNFFKTKVTLADGTVVVKDDIEVNNDTGEIVWDKKKHFATVRKVLSYPQNNIVKKTEIQTGGFSKESILAHGNSDKLIPRKTKDIYLDPKKYGGFDSPIVAYSVLVVADIKKGKAQKLKTVTELLGITIMERSRFEKNPSAFLESKGYLNIRADKLIILPKYSLFELENGRRRLLASAGELQKGNELALPTQFMKFLYLASRYNESKGKPEEIEKKQEFVNQHVSYFDDILQLINDFSKRVILADANLEKINKLYQDNKENISVDELANNIINLFTFTSLGAPAAFKFFDKIVDRKRYTSTKEVLNSTLIHQSITGLYETRIDLGKLGED

SEQ ID NO: 49 - protein, 1365 aa, Streptococcus agalactiae
MNKPYSIGLDIGTNSVGWSIITDDYKVPAKKMRVLGNTDKEYIKKNLIGALLFDGGNTAADRRLKRTARRRYTRRRNRILYLQEIFAEEMSKVDDSFFHRLEDSFLVEEDKRGSKYPIFATLQEEKDYHEKFSTIYHLRKELADKKEKADLRLIYIALAHIIKFRGHFLIEDDSFDVRNTDISKQYQDFLEIFNTTFENNDLLSQNVDVEAILTDKISKSAKKDRILAQYPNQKSTGIFAEFLKLIVGNQADFKKYFNLEDKTPLQFAKDSYDEDLENLLGQIGDEFADLFSAAKKLYDSVLLSGILTVIDLSTKAPLSASMIQRYDEHREDLKQLKQFVKASLPEKYQEIFADSSKDGYAGYIEGKTNQEAFYKYLSKLLTKQEDSENFLEKIKNEDFLRKQRTFDNGSIPHQVHLTELKAIIRRQSEYYPFLKENQDRIEKILTFRIPYYIGPLAREKSDFAWMTRKTDDSIRPWNFEDLVDKEKSAEAFIHRMTNNDFYLPEEKVLPKHSLIYEKFTVYNELTKVRYKNEQGETYFFDSNIKQEIFDGVFKEHRKVSKKKLLDFLAKEYEEFRIVDVIGLDKENKAFNASLGTYHDLEKILDKDFLDNPDNESILEDIVQTLTLFEDREMIKKRLENYKDLFTESQLKKLYRRHYTGWGRLSAKLINGIRDKESQKTILDYLIDDGRSNRNFMQLINDDGLSFKSIISKAQAGSHSDNLKEVVGELAGSPAIKKGILQSLKIVDELVKVMGYEPEQIVVEMARENQTTNQGRRNSRQRYKLLDDGVKNLASNILKEYPTDNQALQNERLFLYYLQNGRDMYTGEALDIDDLSQYDIDHIIPQAFIKDDSIDNRVLVSSAKNRGKSDDVPSLEIVKDCKVFWKKLLDAKLMSQRKYDNLTKAERGGLTSDDKARFIQRQLVETRQITKHVARILDERFNNELDSKGRRIRKVKIVTLKSNLVSNFRKEFGFYKIREVNNYHHAHDAYLNAVVAKAILTKYPQLEPEFVYGDYPKYNSYKTRKATEKLFFYSNIMNFFKTKVTLADGTVVVKDDIEVNNDTGEIVWDKKKHFATVRKVLSYPQNNIVKKTEIQTGGFSKESILAHGNSDKLIPRKTKDIYLDPKKYGGFDSPIVAYSVLVVADIKKGKAQKLKTVTELLGITIMERSRFEKNPSAFLESKGYLNIRADKLIILPKYSLFELENGRRRLLASAGELQKGNELALPTQFMKFLYLASRYNESKGKPEEIEKKQEFVNQHVSYFDDILQLINDFSKRVILADANLEKINKLYQDNKENISVDELANNIINLFTFTSLGAPAAFKFFDKIVDRKRYTSTKEVLNSTLIHQSITGLYETRIDLGKLGED

SEQ ID NO: 50 - protein, 1365 aa, Streptococcus agalactiae
MNKPYSIGLDIGTNSVGWSIITDDYKVPAKKMRVLGNTDKEYIKKNLIGALLFDGGNTAADRRLKRTARRRYTRRRNRILYLQEIFAEEMSKVDDSFFHRLEDSFLVEEDKRGSKYPIFATLQEEKDYHEKFSTIYHLRKELADKKEKADLRLIYIALAHIIKFRGHFLIEDDSFDVRNTDISKQYQDFLEIFNTTFENNDLLSQNVDVEAILTDKISKSAKKDRILAQYPNQKSTGIFAEFLKLIVGNQADFKKYFNLEDKTPLQFAKDSYDEDLENLLGQIGDEFADLFSAAKKLYDSVLLSGILTVIDLSTKAPLSASMIQRYDEHREDLKQLKQFVKASLPEKYQEIFADSSKDGYAGYIEGKTNQEAFYKYLSKLLTKQEDSENFLEKIKNEDFLRKQRTFDNGSIPHQVHLTELKAIIRRQSEYYPFLKENQDRIEKILTFRIPYYIGPLAREKSDFAWMTRKTDDSIRPWNFEDLVDKEKSAEAFIHRMTNNDFYLPEEKVLPKHSLIYEKFTVYNELTKVRYKNEQGETYFFDSNIKQEIFDGVFKEHRKVSKKKLLDFLAKEYEEFRIVDVIGLDKENKAFNASLGTYHDLEKILDKDFLDNPDNESILEDIVQTLTLFEDREMIKKRLENYKDLFTESQLKKLYRRHYTGWGRLSAKLINGIRDKESQKTILDYLIDDGRSNRNFMQLINDDGLSFKSIISKAQAGSHSDNLKEVVGELAGSPAIKKGILQSLKIVDELVKVMGYEPEQIVVEMARENQTTNQGRRNSRQRYKLLDDGVKNLASNILKEYPTDNQALQNERLFLYYLQNGRDMYTGEALDIDNLSQYDIDHIIPQAFIKDDSIDNRVLVSSAKNRGKSDDVPSLEIVKDCKVFWKKLLDAKLMSQRKYDNLTKAERGGLTSDDKARFIQRQLVETRQITKHVARILDERFNNELDSKGRRIRKVKIVTLKSNLVSNFRKEFGFYKIREVNNYHHAHDAYLNAVVAKAILTKYPQLEPEFVYGDYPKYNSYKTRKATEKLFFYSNIMNFFKTKVTLADGTVVVKDDIEVNNDTGEIVWDKKKHFATVRKVLSYPQNNIVKKTEIQTGGFSKESILAHGNSDKLIPRKTKDIYLDPKKYGGFDSPIVAYSVLVVADIKKGKAQKLKTVTELLGITIMERSRFEKNPSAFLESKGYLNIRADKLIILPKYSLFELENGRRRLLASAGELQKGNELALPTQFMKFLYLASRYNESKGKPEEIEKKQEFVNQHVSYFDDILQLINDFSKRVILADANLEKINKLYQDNKENISVDELANNIINLFTFTSLGAPAAFKFFDKIVDRKRYTSTKEVLNSTLIHQSITGLYETRIDLGKLGED

SEQ ID NO: 51 - protein, 1365 aa, Streptococcus agalactiae
MNKPYSIGLDIGTNSVGWSIITDDYKVPAKKMRVLGNTDKEYIKKNLIGALLFDGGNTAADRRLKRTARRRYTRRRNRILYLQEIFAEEMSKVDDSFFHRLEDSFLVEEDKRGSKYPIFATLQEEKDYHEKFSTIYHLRKELADKKEKADLRLIYIALAHIIKFRGHFLIEDDSFDVRNTDISKQYQDFLEIFNTTFENNDLLSQNVDVEAILTDKISKSAKKDRILAQYPNQKSTGIFAEFLKLIVGNQADFKKYFNLEDKTPLQFAKDSYDEDLENLLGQIGDEFADLFSAAKKLYDSVLLSGILTVIDLSTKAPLSASMIQRYDEHREDLKQLKQFVKASLPEKYQEIFADSSKDGYAGYIEGKTNQEAFYKYLSKLLTKQEDSENFLEKIKNEDFLRKQRTFDNGSIPHQVHLTELKAIIRRQSEYYPFLKENQDRIEKILTFRIPYYIGPLAREKSDFAWMTRKTDDSIRPWNFEDLVDKEKSAEAFIHRMTNNDFYLPEEKVLPKHSLIYEKFTVYNELTKVRYKNEQGETYFFDSNIKQEIFDGVFKEHRKVSKKKLLDFLAKEYEEFRIVDVIGLDKENKAFNASLGTYHDLEKILDKDFLDNPDNESILEDIVQTLTLFEDREMIKKRLENYKDLFTESQLKKLYRRHYTGWGRLSAKLINGIRDKESQKTILDYLIDDGRSNRNFMQLINDDGLSFKSIISKAQAGSHSDNLKEVVGELAGSPAIKKGILQSLKIVDELVKVMGYEPEQIVVEMARENQTTNQGRRNSRQRYKLLDDGVKNLASNILKEYPTDNQALQNERLFLYYLQNGRDMYTGEALDIDNLSQYDIDHIIPQAFIKDDSIDNRVLVSSAKNRGKSDDVPSLEIVKDCKVFWKKLLDAKLMSQRKYDNLTKAERGGLTSDDKARFIQRQLVETRQITKHVARILDERFNNELDSKGRRIRKVKIVTLKSNLVSNFRKEFGFYKIREVNNYHHAHDAYLNAVVAKAILTKYPQLEPEFVYGDYPKYNSYKTRKATEKLFFYSNIMNFFKTKVTLADGTVVVKDDIEVNNDTGEIVWDKKKHFATVRKVLSYPQNNIVKKTEIQTGGFSKESILAHGNSDKLIPRKTKDIYLDPKKYGGFDSPIVAYSVLVVADIKKGKAQKLKTVTELLGITIMERSRFEKNPSAFLESKGYLNIRADKLIILPKYSLFELENGRRRLLASAGELQKGNELALPTQFMKFLYLASRYNESKGKPEEIEKKQEFVNQHVSYFDDILQLINDFSKRVILADANLEKINKLYQDNKENISVDELANNIINLFTFTSLGAPAAFKFFDKIVDRKRYTSTKEVLNSTLIHQSITGLYETRIDLGKLGGD

SEQ ID NO: 52 - protein, 1365 aa, Streptococcus agalactiae
MNKPYSIGLDIGTNSVGWSIITDDYKVPAKKMRVLGNTDKEYIKKNLIGALLFDGGNTAADRRLKRTARRRYTRRRNRILYLQEIFAEEMSKVDDSFFHRLEDSFLVEEDKRGSKYPIFATLQEEKDYHEKFSTIYHLRKELADKKEKADLRLIYIALAHIIKFRGHFLIEDDSFDVRNTDISKQYQDFLEIFNTTFENNDLLSQNVDVEAILTDKISKSAKKDRILAQYPNQKSTGIFAEFLKLIVGNQADFKKYFNLEDKTPLQFAKDSYDEDLENLLGQIGDEFADLFSAAKKLYDSVLLSGILTVIDLSTKAPLSASMIQRYDEHREDLKQLKQFVKASLPEKYQEIFADSSKDGYAGYIEGKTNQEAFYKYLSKLLTKQEDSENFLEKIKNEDFLRKQRTFDNGSIPHQVHLTELKAIIRRQSEYYPFLKENQDRIEKILTFRIPYYIGPLAREKSDFAWMTRKTDDSIRPWNFEDLVDKEKSAEAFIHRMTNNDFYLPEEKVLPKHSLIYEKFTVYNELTKVRYKNEQGETYFFDSNIKQEIFDGVFKEHRKVSKKKLLDFLAKEYEEFRIVDVIGLDKENKAFNASLGTYHDLEKILDKDFLDNPDNESILEDIVQTLTLFEDREMIKKRLENYKDLFTESQLKKLYRRHYTGWGRLSAKLINGIRDKESQKTILDYLIDDGRSNRNFMQLINDDGLSFKSIISKAQAGSHSDNLKEVVGELAGSPAIKKGILQSLKIVDELVKVMGYEPEQIVVEMARENQTTNQGRRNSRQRYKLLDDGVKNLASNILKEYPTDNQALQNERLFLYYLQNGRDMYTGEALDIDNLSQYDIDHIIPQAFIKDDSIDNRVLVSSAKNRGKSDDVPSLEIVKDCKVFWKKLLDAKLMSQRKYDNLTKAERGGLTSDDKARFIQRQLVETRQITKHVARILDERFNNELDSKGRRIRKVKIVTLKSNLVSNFRKEFGFYKIREVNNYHHAHDAYLNAVVAKAILTKYPQLEPEFVYGDYPKYNSYKTRKATEKLFFYSNIMNFFKTKVTLADGTVVVKDDIEVNNDTGEIVWDKKKHFATVRKVLSYPQNNIVKKTEIQTGGFSKESILAHGNSDKLIPRKTKDIYLDPKKYGGFDSPIVAYSVLVVADIKKGKAQKLKTVTELLGITIMERSRFEKNPSAFLESKGYLNIRDDKLMILPKYSLFELENGRRRLLASAGELQKGNELALPTQFMKFLYLASRYNESKGKPEEIEKKQEFVNQHVSYFDDILQLINDFSKRVILADANLEKINKLYQDNKENISVDELANNIINLFTFTSLGAPAAFKFFDKIVDRKRYTSTKEVLNSTLIHQSITGLYETRIDLGKLGED

SEQ ID NO: 53 - protein, 1365 aa, Streptococcus agalactiae
MNKPYSIGLDIGTNSVGWSIITDDYKVPAKKMRVLGNTDKEYIKKNLIGALLFDGGNTAADRRLKRTARRRYTRRRNRILYLQEIFAEEMSKVDDSFFHRLEDSFLVEEDKRGSKYPIFATLQEEKDYHEKFSTIYHLRKELADKKEKADLRLIYIALAHIIKFRGHFLIEDDSFDVRNTDISKQYQDFLEIFNTTFENNDLLSQNVDVEAILTDKISKSAKKDRILAQYPNQKSTGIFAEFLKLIVGNQADFKKYFNLEDKTPLQFAKDSYDEDLENLLGQIGDEFADLFSAAKKLYDSVLLSGILTVIDLSTKAPLSASMIQRYDEHREDLKQLKQFVKASLPEKYQEIFADSSKDGYAGYIEGKTNQEAFYKYLSKLLTKQEDSENFLEKIKNEDFLRKQRTFDNGSIPHQVHLTELKAIIRRQSEYYPFLKENQDRIEKILTFRIPYYIGPLAREKSDFAWMTRKTDDSIRPWNFEDLVDKEKSAEAFIHRMTNNDFYLPEEKVLPKHSLIYEKFTVYNELTKVRYKNEQGETYFFDSNIKQEIFDGVFKEHRKVSKKKLLDFLAKEYEEFRIVDVIGLDKENKAFNASLGTYHDLEKILDKDFLDNPDNESILEDIVQTLTLFEDREMIKKRLENYKDLFTESQLKKLYRRHYTGWGRLSAKLINGIRDKESQKTILDYLIDDGRSNRNFMQLINDDGLSFKSIISKAQAGSHSDNLKEVVGELAGSPAIKKGILQSLKIVDELVKVVGYEPEQIVVEMARENQTTNQGRRNSRQRYKLLDDGVKNLASNILKEYPTDNQALQNERLFLYYLQNGRDMYTGEALDIDNLSQYDIDHIIPQAFIKDDSIDNRVLVSSAKNRGKSDDVPSLEIVKDCKVFWKKLLDAKLMSQRKYDNLTKAERGGLTSDDKARFIQRQLVETRQITKHVARILDERFNNELDSKGRRIRKVKIVTLKSNLVSNFRKEFGFYKIREVNNYHHAHDAYLNAVVAKAILTKYPQLEPEFVYGDYPKYNSYKTRKATEKLFFYSNIMNFFKTKVTLADGTVVVKDDIEVNNDTGEIVWDKKKHFATVRKVLSYPQNNIVKKTEIQTGGFSKESILAHGNSDKLIPRKTKDIYLDPKKYGGFDSPIVAYSVLVVADIKKGKAQKLKTVTELLGITIMERSRFEKNPSAFLESKGYLNIRADKLIILPKYSLFELENGRRRLLASAGELQKGNELALPTQFMKFLYLASRYNESKGKPEEIEKKQEFVNQHVSYFDDILQLINDFSKRVILADANLEKINKLYQDNKENISVDELANNIINLFTFTSLGAPAAFKFFDKIVDRKRYTSTKEVLNSTLIHQSITGLYETRIDLGKLGED

SEQ ID NO: 54 - protein, 1365 aa, Streptococcus agalactiae
MNKPYSIGLDIGTNSVGWSIITDDYKVPAKKMRVLGNTDKEYIKKNLIGALLFDGGNTAADRRLKRTARRRYTRRRNRILYLQEIFAEEMSKVDDSFFHRLEDSFLVEEDKRGSKYPIFATLQEEKDYHEKFSTIYHLRKELADKKEKADLRLIYIALAHIIKFRGHFLIEDDSFDVRNTDISKQYQDFLEIFNTTFENNDLLSQNVDVEAILTDKISKSAKKDRILAQYPNQKSTGIFAEFLKLIVGNQADFKKYFNLEDKTPLQFAKDSYDEDLENLLRQIGDEFADLFSAAKKLYDSVLLSGILTVIDLSTKAPLSASMIQRYDEHREDLKQLKQFVKASLPEKYQEIFADSSKDGYAGYIEGKTNQEAFYKYLSKLLTKQEDSENFLEKIKNEDFLRKQRTFDNGSIPHQVHLTELKAIIRRQSEYYPFLKENQDRIEKILTFRIPYYIGPLAREKSDFAWMTRKTDDSIRPWNFEDLVDKEKSAEAFIHRMTNNDFYLPEEKVLPKHSLIYEKFTVYNELTKVRYKNEQGETYFFDSNIKQEIFDGVFKEHRKVSKKKLLDFLAKEYEEFRIVDVIGLDKENKAFNASLGTYHDLEKILDKDFLDNPDNESILEDIVQTLTLFEDREMIKKRLENYKDLFTESQLKKLYRRHYTGWGRLSAKLINGIRDKESQKTILDYLIDDGRSNRNFMQLINDDGLSFKSIISKAQAGSHSDNLKEVVGELAGSPAIKKGILQSLKIVDELVKVMGYEPEQIVVEMARENQTTNQGRRNSRQRYKLLDDGVKNLASNILKEYPTDNQALQNERLFLYYLQNGRDMYTGEALDIDNLSQYDIDHIIPQAFIKDDSIDNRVLVSSAKNRGKSDDVPSLEIVKDCKVFWKKLLDAKLMSQRKYDNLTKAERGGLTSDDKARFIQRQLVETRQITKHVARILDERFNNELDSKGRRIRKVKIVTLKSNLVSNFRKEFGFYKIREVNNYHHAHDAYLNAVVAKAILTKYPQLEPEFVYGDYPKYNSYKTRKATEKLFFYSNIMNFFKTKVTLADGTVVVKDDIEVNNDTGEIVWDKKKHFATVRKVLSYPQNNIVKKTEIQTGGFSKESILAHGNSDKLIPRKTKDIYLDPKKYGGFDSPIVAYSVLVVADIKKGKAQKLKTVTELLGITIMERSRFEKNPSAFLESKGYLNIRADKLIILPKYSLFELENGRRRLLASAGELQKGNELALPTQFMKFLYLASRYNESKGKPEEIEKKQEFVNQHVSYFDDILQLINDFSKRVILADANLEKINKLYQDNKENISVDELANNIINLFTFTSLGAPAAFKFFDKIVDRKRYTSTKEVLNSTLIHQSITGLYETRIDLGKLGED

SEQ ID NO: 55 - protein, 1365 aa, Streptococcus agalactiae
MNKPYSIGLDIGTNSVGWSIITDDYKVPAKKMRVLGNTDKEYIKKNLIGALLFDGGNTAADRRLKRTARRRYTRRRNRILYLQEIFAEEMSKVDDSFFHRLEDSFLVEEDKRGSKYPIFATMQEEKDYHEKFPTIYHLRKELADKKEKADLRLVYLALAHIIKFRGHFLIEDDRFDVRNTDIQKQYQAFLEIFDTSFENNHLLSQNVDVEAILTDKISKSAKKDRILAQYPNQKSTGIFAEFLKLIVGNQADFKKHFNLEDKTPLQFAKDSYDEDLENLLGQIGDEFADLFSAAKKLYDSVLLSGILTVTDLSTKAPLSAYMIQRYDEHREDLKQLKQFVKASLPEKYQEIFADSSKDGYAGYIEGKTNQEAFYKYLSKLLTKQEDSEYFLEKIKNEDFLRKQRTFDNGSIPHQVHLTELKAIIRRQSEYYPFLKENQDKIEKILTFRIPYYVGPLARGNSDFAWMTRKTDDSIRPWNFEDLVDKEKSAEAFIHRMTNNDLYLPEEKVLPKHSLIYEKFTVYNELTKVRYKNEQGETYFFDSNVKQEIFDGVFKEHRKVSKKQLLDFLAKEFEEFRIVDVTGLDKENKAFNASLGTYHDLKKILDKDFLDNPDNESILEDIVQTITLFEDREMIKKRLENYKDLFTESQLKKLYRRHYTGWGRLSAKLINGIRDRESQKTILDYLISDGRANRNFMQLINDDGLSFKSIISKAQSGSHSDNLKEVVGELAGSPAIKKGILQSLKIVDELVKVMGYEPEQIVVEMARENQTTNQGRRNSRQRYKLLEDGVKNLASDILKEYPTDNQALQNERLFLYYLQNGRDMYTGEALDIDNLSQYDIDHIVPQAFIKDDSIDNRVLVSSAKNRGKSDDVPSIDIVKARKAFWKKLLDAKLISQRKYDNLTKAERGGLTPDDKAGFIQRQLVETRQITKHVARILDERFNNKVDDNNKPIRKVKIVTLKSNLVSNFRKEFGFYKIREVNNYHHAHDAYLNAVVAKAILTKYPQLEPEFVYGDYPKYNSYKTRKATEKLFFYSNIMNFFKTKVTLADETVVVKDDIEVNNETGEIAWDKKKHFATVRKVLSYPQVNIVKKTEVQTGGFSKESILAHSNSDKLIPRKTKDIYLDPKKYGGFDSPIVAYSVLVLADIKKGKAQKLKTVKELIGITIMERERFEKNPSAFLESKGYLNIRTDKLIILPKYSLFELENGRRRLLASAGELQKGNELALPTQYMKFLYLASRYNESKGKPEEIEKKQEFVNQHISYFDDILQLINDFSKRVILADANLEKINKLYSDNKDNTPVDELAKNIINLFTFTSLGAPAAFKFFDKSVDRKRYTSTKEVLDSTLIHQSITGLYETRIDLGKLGED

SEQ ID NO: 56 - protein, 1365 aa, Streptococcus agalactiae
MNKPYSIGLDIGTNSVGWSIITDDYKVPAKKMRVLGNTDKEYIKKNLIGALLFDGGNTAADRRLKRTARRRYTRRRNRILYLQEIFAEEMSKVDDSFFHRLEDSFLVEEDKRGSKYPIFATMQEEKYYHEKFPTIYHLRKELADKKEKADLRLIYLALAHIIKFRGHFLIEDDRFDVRNTDIQKQYQAFLEIFDTTFENNDLLSQNVDVEAILTDKISKSAKKDRILARYPNQKSTGIFAEFLKLIVGNQADFKKHFNLEDKTPLQFAKDSYDEDLENLLGQIGDEFADLFSAAKKLYDSVLLSGILTVTDLSTKAPLSASMIQHYDEHREDLKQLKQFVKASLPEKYQEIFADSSKDGYAGYIEGKTNQEAFYKYLSKLLTKQEGSEYLLEKIKNEDFLRKQRTFDNGSIPHQVHLTELRAIIRRQSEYYPFLKENLDRIEKILTFRIPYYVGPLAREKSDFAWMTRKTDDSIRPWNFEDLVDKEKSAEAFIHRMTNNDLYLPEEKVLPKHSLIYEKFTVYNELTKVRFLAEGFKDFQFLNRKQKETIFNSLFKEKRKVTEKDIISFLNKVDGYEGIAIKGIEKQFNASLSTYHDLKKILGKDFLDNTDNELILEDIVQTLTLFEDREMIRKRLDIYKDFFTESQLKKLYRRHYTGWGRLSAKLINGIRNKENQKTILDYLIDDGSANRNFMQLIKDAGLSFKPIIDKARTGSHSDNLKEVVGELAGSPAIKKGILQSLKIVDELVKVMGYEPEQIVVEMARENQTTAKGLSRSRQRLTTLRESLANLKSEKKPKYVKDQVENHHLSDDRLFLYYLQNGKDMYTDDELDIDNLSQYDIDHIIPQAFIKDDSIDNRVLVSSAKNRGKSDDVPSVEIVKDCKVFWKKLLDAKLMSQRKYDNLTKAERGGLTSDDKARFIQRQLVETRQITKHVARILDERFNNELDSKGRRIRKVKIVTLKSNLVSNFRKEFGFYKIREVNNYHHAHDAYLNAVVAKAILTKYPQLEPEFVYGDYPKYNSYKTRKATEKLFFYSNIMNFFKTKVTLADGTVVVKDDIEVNNDTGEIVWDKKKHFATVRKVLSYPQVNIVKKTEIQTGGFSKESILAHGNSDKLIPRKTKDIYLDPKKYGGFDSPIVAYSVLVVADIKKGKAQKLKTVTELLGITIMERSRFEKNPSAFLESKGYLNIRDDKLMILPKYSLFELENGRRRLLASAGELQKGNELALPTQFMKFLYLASRYNELKGKPEEIEQKQEFVVQHVSYFDDILQIINDFSNRVILADANLEKINKLYQDNKENIPVDELANNIINLFTFTSLGAPAAFKFFDKIVDRKRYTSTKEVLNSTLIHQSITGLYETRIDLGKLGED

SEQ ID NO: 57 - protein, 1365 aa, Streptococcus agalactiae
MNKPYSIGLDIGTNSVGWSIITDDYKVPAKKMRVLGNTDKEYIKKNLIGALLFDGGNTAADRRLKRTARRRYTRRRNRILYLQEIFAEEMSKVDDSFFHRLEDSFLVEEDKRGSKYPIFATMQEEKYYHEKFPTIYHLRKELADKKEKADLRLIYLALAHIIKFRGHFLIEDDRFDVRNTDIQKQYQAFLEIFDTTFENNDLLSQNVDVEAILTDKISKSAKKDRILARYPNQKSTGIFAEFLKLIVGNQADFKKHFNLEDKTPLQFAKDSYDEDLENLLGQIGDEFADLFSAAKKLYDSVLLSGILTVTDLSTKAPLSASMIQRYDEHREDLKQLKQFVKASLPEKYQEIFADSSKDGYAGYIEGKTNQEAFYKYLSKLLTKQEGSEYLLEKIKNEDFLRKQRTFDNGSIPHQVHLTELRAIIRRQSEYYPFLKENLDRIEKILTFRIPYYVGPLAREKSDFAWMTRKTDDSIRPWNFEDLVDKEKSAEAFIHRMTNNDLYLPEEKVLPKHSLIYEKFTVYNELTKVRFLAEGFKDFQFLNRKQKETIFNSLFKEKRKVTEKDIISFLNKVDGYEGIAIKGIEKQFNASLSTYHDLKKILGKDFLDNTDNELILEDIVQTLTLFEDREMIRKRLDIYKDFFTESQLKKLYRRHYTGWERLSAKLINGIRNKENQKTILDYLIDDGSANRNFMQLIKDAGLSFKPIIDKARTGSHLDNLKEVVGELAGSPAIKKGILQSLKIVDELVKVMGYEPEQIVVEMARENQTTAKGLSRSRQRLTTLRESLANLKSEKKPKYVKDQVENHHLSDDRLFLYYLQNGKDMYTDDELDIDNLSQYDIDHIIPQAFIKDDSIDNRVLVSSAKNRGKSDDVPSLEIVKDCKVFWKKLLDAKLMSQRKYDNLTKAERGGLTSDDKARFIQRQLVETRQITKHVARILDERFNNELDSKGRRIRKVKIVTLKSNLVSNFRKEFGFYKIREVNNYHHAHDAYLNAVVAKAILTKYPQLEPEFVYGDYPKYNSYKTRKATEKLFFYSNIMNFFKTKVTLADGTVVVKDDIEVNNDTGEIVWDKKKHFATVRKVLSYPQVNIVKKTEVQTGGFSKESILAHGNSDKLIPRKTKDIYLDPKKYGGFDSPIVAYSVLVVADIKKGKAQKLKTVTELLGITIMERSRFEKNPSAFLESKGYLNIRTDKLIILPKYSLFELENGRRRLLASAGELQKGNELALPTQYMKFLYLASRYNELKGKPEEIEQKQEFVVQHVSYFDDILQIINDFSNRVILADANLEKINKLYQDNKENIPVDELANNIINLFTFTSLGAPAAFKFFDKIVDRKRYTSTKEVLNSTLIHQSITGLYETRIDLGKLGEG

SEQ ID NO: 58 - protein, 1365 aa, Streptococcus agalactiae
MNKPYSIGLDIGTNSVGWSIITDDYKVPAKKMRVLGNTDKEYIKKNLIGALLFDGGNTAADRRLKRTARRRYTRRRNRILYLQEIFAEEMSKVDDSFFHRLEDSFLVEEDKRGSKYPIFATMQEEKYYHEKFPTIYHLRKELADKKEKADLRLIYLALAHIIKFRGHFLIEDDRFDVRNTDIQKQYQAFLEIFDTTFENNDLLSQNVDVEAILTDKISKSAKKDRILARYPNQKSTGIFAEFLKLIVGNQADFKKHFNLEDKTPLQFAKDSYDEDLENLLGQIGDEFADLFSAAKKLYDSVLLSGILTVTDLSTKAPLSASMIQRYDEHREDLKQLKQFVKASLPEKYQEIFADSSKDGYAGYIEGKTNQEAFYKYLSKLLTKQEGSEYLLEKIKNEDFLRKQRTFDNGSIPHQVHLTELRAIIRRQSEYYPFLKENLDRIEKILTFRIPYYVGPLAREKSDFAWMTRKTDDSIRPWNFEDLVDKEKSAEAFIHRMTNNDLYLPEEKVLPKHSLIYEKFTVYNELTKVRFLAEGFKDFQFLNRKQKETIFNSLFKEKRKVTEKDIISFLNKVDGYEGIAIKGIEKQFNASLSTYHDLKKILGKDFLDNTDNELILEDIVQTLTLFEDREMIRKRLDIYKDFFTESQLKKLYRRHYTGWGRLSAKLINGIRNKENQKTILDYLIDDGSANRNFMQLIKDAGLSFKPIIDKARTGSHLDNLKEVVGELAGSPAIKKGILQSLKIVDELVKVMGYEPEQIVVEMARENQTTAKGLSRSRQRLTTLRESLANLKSEKKPKYVKDQVENHHLSDDRLFLYYLQNGKDMYTDDELDIDNLSQYDIDHIIPQAFIKDDSIDNRVLVSSAKNRGKSDDVPSLEIVKDCKVFWKKLLDAKLMSQRKYDNLTKAERGGLTSDDKARFIQRQLVETRQITKHVARILDERFNNELDSKGRRIRKVKIVTLKSNLVSNFRKEFGFYKIREVNNYHHAHDAYLNAVVAKAILTKYPQLEPEFVYGDYPKYNSYKTRKATEKLFFYSNIMNFFKTKVTLADGTVVVKDDIEVNNDTGEIVWDKKKHFATVRKVLSYPQVNIVKKTEVQTGGFSKESILAHGNSDKLIPRKTKDIYLDPKKYGGFDSPIVAYSVLVVADIKKGKAQKLKTVTELLGITIMERSRFEKNPSAFLESKGYLNIRTDKLIILPKYSLFELENGRRRLLASAGELQKGNELALPTQYMKFLYLASRYNELKGKPEEIEQKQEFVVQHVSYFDDILQIINDFSNRVILADANLEKINKLYQDNKENIPVDELANNIINLFTFTSLGAPAAFKFFDKIVDRKRYTSTKEVLNSTLIHQSITGLYETRIDLGKLGEG

SEQ ID NO: 59 - protein, 1365 aa, Streptococcus agalactiae
MNKPYSIGLDIGTNSVGWSIITDDYKVPAKKMRVLGNTDKEYIKKNLIGALLFDGGNTAADRRLKRTARRRYTRRRNRILYLQEIFAEEMSKVDDSFFHRLEDSFLVEEDKRGSKYPIFATMQEEKYYHEKFPTIYHLRKELADKKEKADLRLIYLALAHIIKFRGHFLIEDDRFDVRNTDIQKQYQAFLEIFDTTFENNDLLSQNVDVEAILTDKISKSAKKDRILARYPNQKSTGIFAEFLKLIVGNQADFKKHFNLEDKTPLQFAKDSYDEDLENLLGQIGDEFADLFSAAKKLYDSVLLSGILTVTDLSTKAPLSASMIQRYDEHREDLKQLKQFVKASLPEKYQEIFADSSKDGYAGYIEGKTNQEAFYKYLSKLLTKQEGSEYLLEKIKNEDFLRKQRTFDNGSIPHQVHLTELRAIIRRQSEYYPFLKENLDRIEKILTFRIPYYVGPLAREKSDFAWMTRKTDDSIRPWNFEDLVDKEKSAEAFIHRMTNNDLYLPEEKVLPKHSLIYEKFTVYNELTKVRFLAEGFKDFQFLNRKQKETIFNSLFKEKRKVTEKDIISFLNKVDGYEGIAIKGIEKQFNASLSTYHDLKKILGKDFLDNTDNELILEDIVQTLTLFEDREMIRKRLDIYKDFFTESQLKKLYRRHYTGWGRLSAKLINGIRNKENQKTILDYLIDDGSANRNFMQLIKDAGLSFKPIIDKARTGSHSDNLKEVVGELAGSPAIKKGILQSLKIVDELVKVMGYEPEQIVVEMARENQTTAKGLSRLRQRLTTLRESLANLKSEKKPKYVKDQVENHHLSDDRLFLYYLQNGKDMYTDDELDIDNLSQYDIDHIIPQAFIKDDSIDNRVLVSSAKNRGKSDDVPSVEIVKDCKVFWKKLLDAKLMSQRKYDNLTKAERGGLTSDDKARFIQRQLVETRQITKHVARILDERFNNELDSKGRRIRKVKIVTLKSNLVSNFRKEFGFYKIREVNNYHHAHDAYLNAVVAKAILTKYPQLEPEFVYGDYPKYNSYKTRKATEKLFFYSNIMNFFKTKVTLADGTVVVKDDIEVNNDTGEIVWDKKKHFATVRKVLSYPQVNIVKKTEIQTGGFSKESILAHGNSDKLIPRKTKDIYLDPKKYGGFDSPIVAYSVLVVADIKKGKAQKLKTVTELLGITIMERSRFEKNPSAFLESKGYLNIRDDKLMILPKYSLFELENGRRRLLASADELQKGNELALPTQFMKFLYLASRYNELKGKPEEIEQKQEFVVQHVSYFDDILQIINDFSNRVILADANLEKINKLYQDNKENIPVDELANNIINLFTFTSLGAPAAFKFFDKIVDRKRYTSTKEVLNSTLIHQSITGLYETRIDLGKLGED

SEQ ID NO: 60 - protein, 1365 aa, Streptococcus agalactiae
MNKPYSIGLDIGTNSVGWSIITDDYKVPAKKMRVLGNTDKEYIKKNLIGALLFDGGNTAADRRLKRTARRRYTRRRNRILYLQEIFAEEMSKVDDSFFHRLEDSFLVEEDKRGSKYPIFATMQEEKYYHEKFPTIYHLRKELADKKEKADLRLIYLALAHIIKFRGHFLIEDDRFDVRNTDIQKQYQAFLEIFDTTFENNDLLSQNVDVEAILTDKISKSAKKDRILARYPNQKSTGIFAEFLKLIVGNQADFKKHFNLEDKTPLQFAKDSYDEDLENLLGQIGDEFADLFSAAKKLYDSVLLSGILTVTDLSTKAPLSASMIQRYDEHREDLKQLKQFVKASLPEKYQEIFADSSKDGYAGYIEGKTNQEAFYKYLSKLLTKQEGSEYLLEKIKNEDFLRKQRTFDNGSIPHQVHLTELRAIIRRQSEYYPFLKENLDRIEKILTFRIPYYVGPLAREKSDFAWMTRKTDDSIRPWNFEDLVDKEKSAEAFIHRMTNNDLYLPEEKVLPKHSLIYEKFTVYNELTKVRFLAEGFKDFQFLNRKQKETIFNSLFKEKRKVTEKDIISFLNKVDGYEGIAIKGIEKQFNASLSTYHDLKKILGKDFLDNTDNELILEDIVQTLTLFEDREMIRKRLDIYKDFFTESQLKKLYRRHYTGWGRLSAKLINGIRNKENQKTILDYLIDDGSANRNFMQLIKDAGLSFKPIIDKARTGSHSDNLKEVVGELAGSPAIKKGILQSLKIVDELVKVMGYEPEQIVVEMARENQTTAKGLSRSRQRLTTLRESLANLKSEKKPKYVKDQVENHHLSDDRLFLYYLQNGKDMYTDDELDIDNLSQYDIDHIIPQAFIKDDSIDNRVLVSSAKNRGKSDDVPSVEIVKDCKVFWKKLLDAKLMSQRKYDNLTKAERGGLTSDDKARFIQRQLVETRQITKHVARILDERFNNELDSKGRRIRKVKIVTLKSNLVSNFRKEFGFYKIREVNNYHHAHDAYLNAVVAKAILTKYPQLEPEFVYGDYPKYNSYKTRKATEKLFFYSNIMNFFKTKVTLADGTVVVKDDIEVNNDTGEIVWDKKKHFATVRKVLSYPQVNIVKKTEIQTGGFSKESILAHGNSDKLIPRKTKDIYLDPKKYGGFDSPIVAYSVLVVADIKKGKAQKLKTVTELLGITIMERSRFEKNPSAFLESKGYLNIRDDKLMILPKYSLFELENGRRRLLASAGELQKGNELALPTQFMKFLYLASRYNELKGKPEEIEQKQEFVVQHVSYFDDILQIINDFSNRVILADANLEKINKLYQDNKENIPVDELANNIINLFTFTSLGAPAAFKFFDKIVDRKRYTSTKEVLNSTLIHQSITGLYETRIDLGKLGED

SEQ ID NO: 61 - protein, 1365 aa, Streptococcus agalactiae
MNKPYSIGLDIGTNSVGWSIITDDYKVPAKKMRVLGNTDKEYIKKNLIGALLFDGGNTAADRRLKRTARRRYTRRRNRILYLQEIFAEEMSKVDDSFFHRLEDSFLVEEDKRGSKYPIFATMQEEKYYHEKFPTIYHLRKELADKKEKADLRLIYLALAHIIKFRGHFLIEDDRFDVRNTDIQKQYQAFLEIFDTTFENNDLLSQNVDVEAILTDKISKSAKKDRILARYPNQKSTGIFAEFLKLIVGNQADFKKHFNLEDKTPLQFAKDSYDEDLENLLGQIGDEFADLFSAAKKLYDSVLLSGILTVTDLSTKAPLSASMIQRYDEHREDLKQLKQFVKASLPEKYQEIFADSSKDGYAGYIEGKTNQEAFYKYLSKLLTKQEGSEYLLEKIKNEDFLRKQRTFDNGSIPHQVHLTELRAIIRRQSEYYPFLKENLDRIEKILTFRIPYYVGPLAREKSDFAWMTRKTDDSIRPWNFEDLVDKEKSAEAFIHRMTNNDLYLPEEKVLPKHSLIYEKFTVYNELTKVRFLAEGFKDFQFLNRKQKETIFNSLFKEKRKVTEKDIISFLNKVDGYEGIAIKGIEKQFNASLSTYHDLKKILGKDFLDNTDNELILEDIVQTLTLFEDREMIRKRLDIYKDFFTESQLKKLYRRHYTGWGRLSAKLINGIRNKENQKTILDYLIDDGSANRNFMQLIKDAGLSFKPIIDKARTGSHSDNLKEVVGELAGSPAIKKGILQSLKIVDELVKVMGYEPEQIVVEMARENQTTAKGLSRSRQRLTTLRESLANLKSEKKPKYVKDQVENHHLSDDRLFLYYLQNGKDMYTDDELDIDNLSQYDIDHIIPQAFIKDDSIDNRVLVSSAKNRGKSDDVPSVEIVKDCKVFWKKLLDAKLMSQRKYDNLTKAERGGLTSDDKARFIQRQLVETRQITKHVARILDERFNNELDSKGRRIRKVKIVTLKSNLVSNFRKEFGFYKIREVNNYHHAHDAYLNAVVAKAILTKYPQLEPEFVYGDYPKYNSYKTRKATEKLFFYSNIMNFFKTKVTLADGTVVVKDDIEVNNDTGEIVWDKKKHFATVRKVLSYPQVNIVKKTEIQTGGFSKESILAHGNSDKLIPRKTKDIYLDPKKYGGFDSPKVAYSVLVVADIKKGKAQKLKTVTELLGITIMERSRFEKNPSAFLESKGYLNIRDDKLMILPKYSLFELENGRRRLLASAGELQKGNELALPTQFMKFLYLASRYNELKGKPEEIEQKQEFVVQHVSYFDDILQIINDFSNRVILADANLEKINKLYQDNKENIPVDELANNIINLFTFTSLGAPAAFKFFDKIVDRKRYTSTKEVLNSTLIHKSITGLYETRIDLGKLGED

SEQ ID NO: 62 - protein, 1365 aa, Streptococcus agalactiae
MNKPYSIGLDIGTNSVGWSIITDDYKVPAKKMRVLGNTDKEYIKKNLIGALLFDGGNTAADRRLKRTARRRYTRRRNRILYLQEIFAEEMSKVDDSFFHRLEDSFLVEEDKRGSKYPIFATMQEEKYYHEKFPTIYHLRKELADKKEKADLRLIYLALAHIIKFRGHFLIEDDRFDVRNTDIQKQYQAFLEIFDTTFENNDLLSQNVDVEAILTDKISKSAKKDRILARYPNQKSTGIFAEFLKLIVGNQADFKKHFNLEDKTPLQFAKDSYDEDLENLLGQIGDEFADLFSAAKKLYDSVLLSGILTVTDLSTKAPLSASMIQRYDEHREDLKQLKQFVKASLPEKYQEIFADSSKDGYAGYIEGKTNQEAFYKYLSKLLTKQEGSEYLLEKIKNEDFLRKQRTFDNGSIPHQVHLTELRAIIRRQSEYYPLLKENLDRIEKILTFRIPYYVGPLAREKSDFAWMTRKTDDSIRPWNFEDLVDKEKSAEAFIHRMTNNDLYLPEEKVLPKHSLIYEKFTVYNELTKVRFLAEGFKDFQFLNRKQKETIFNSLFKEKRKVTEKDIISFLNKVDGYEGIAIKGIEKQFNASLSTYHDLKKILGKDFLDNTDNELILEDIVQTLTLFEDREMIRKRLDIYKDFFTESQLKKLYRRHYTGWGRLSAKLINGIRNKENQKTILDYLIDDGSANRNFMQLIKDAGLSFKPIIDKARTGSHSDNLKEVVGELAGSPAIKKGILQSLKIVDELVKVMGYEPEQIVVEMARENQTTAKGLSRSRQRLTTLRESLANLKSEKKPKYVKDQVENHHLSDDRLFLYYLQNGKDMYTDDELDIDNLSQYDIDHIIPQAFIKDDSIDNRVLVSSAKNRGKSDDVPSVEIVKDCKVFWKKLLDAKLMSQRKYDNLTKAERGGLTSDDKARFIQRQLVETRQITKHVARILDERFNNELDSKGRRIRKVKIVTLKSNLVSNFRKEFGFYKIREVNNYHHAHDAYLNAVVAKAILTKYPQLEPEFVYGDYPKYNSYKTRKATEKLFFYSNIMNFFKTKVTLADGTVVVKDDIEVNNDTGEIVWDKKKHFATVRKVLSYPQVNIVKKTEIQTGGFSKESILAHGNSDKLIPRKTKDIYLDPKKYGGFDSPIVAYSVLVVADIKKGKAQKLKTVTELLGITIMERSRFEKNPSAFLESKGYLDIRDDKLMILPKYSLFELENGRRRLLASAGELQKGNELALPTQFMKFLYLASRYNELKGKPEEIEQKQEFVVQHVSYFDDILQIINDFSNRVILADANLEKINKLYQDNKENIPVDELANNIINLFTFTSLGAPAAFKFFDKIVDRKRYTSTKEVLNSTLIHQSITGLYETRIDLGKLGED

SEQ ID NO: 63 - protein, 1365 aa, Streptococcus agalactiae
  VARIANT (117)..(117): Xaa can be any naturally occurring amino acid
MNKPYSIGLDIGTNSVGWSIITDDYKVPAKKMRVLGNTDKEYIKKNLIGALLFDGGNTAADRRLKRTARRRYTRRRNRILYLQEIFAEEMSKVDDSFFHRLEDSFLVEEDKRGSKYXIFATLQEEKDYHEKFSTIYHLRKELADKKEKADLRLIYIALAHIIKFRGHFLIEDDSFDVRNTDISKQYQDFLEIFNTTFENNDLLSQNVDVEAILTDKISKSAKKDRILAQYPNQKSTGIFAEFLKLIVGNQADFKKYFNLEDKTPLQFAKDSYDEDLENLLGQIGDEFADLFSAAKKLYDSVLLSGILTVIDLSTKAPLSASMIQRYDEHREDLKQLKQFVKASLPEKYQEIFADSSKDGYAGYIEGKTNQEAFYKYLSKLLTKQEDSENFLEKIKNEDFLRKQRTFDNGSIPHQVHLTELKAIIRRQSEYYPFLKENQDRIEKILTFRIPYYIGPLAREKSDFAWMTRKTDDSIRPWNFEDLVDKEKSAEAFIHRMTNNDFYLPEEKVLPKHSLIYEKFTVYNELTKVRYKNEQGETYFFDSNIKQEIFDGVFKEHRKVSKKKLLDFLAKEYEEFRIVDVIGLDKENKAFNASLGTYHDLEKILDKDFLDNPDNESILEDIVQTLTLFEDREMIKKRLENYKDLFTESQLKKLYRRHYTGWGRLSAKLINGIRDKESQKTILDYLIDDGRSNRNFMQLINDDGLSFKSIISKAQAGSHSDNLKEVVGELAGSPAIKKGILQSLKIVDELVKVMGYEPEQIVVEMARENQTTNQGRRNSRQRYKLLDDGVKNLASNILKEYPTDNQALQNERLFLYYLQNGRDMYTGEALDIDNLSQYDIDHIIPQAFIKDDSIDNRVLVSSAKNRGKSDDVPSLEIVKDCKVFWKKLLDAKLMSQRKYDNLTKAERGGLTSDDKARFIQRQLVETRQITKHVARILDERFNNELDSKGRRIRKVKIVTLKSNLVSNFRKEFGFYKIREVNNYHHAHDAYLNAVVAKAILTKYPQLEPEFVYGDYPKYNSYKTRKATEKLFFYSNIMNFFKTKVTLADGTVVVKDDIEVNNDTGEIVWDKKKHFATVRKVLSYPQNNIVKKTEIQTGGFSKESILAHGNSDKLIPRKTKDIYLDPKKYGGFDSPIVAYSVLVVADIKKGKAQKLKTVTELLGITIMERSRFEKNPSAFLESKGYLNIRADKLIILPKYSLFELENGRRRLLASAGELQKGNELALPTQFMKFLYLASRYNESKGKPEEIEKKQEFVNQHVSYFDDILQLINDFSKRVILADANLEKINKLYQDNKENISVDELANNIINLFTFTSLGAPAAFKFFDKIVDRKRYTSTKEVLNSTLIHQSITGLYETRIDLGKLGED

SEQ ID NO: 64 - protein, 1365 aa, Streptococcus agalactiae
MNKPYSIGLDIGTNSVGWSIITDDYKVPAKKMRVLGNTDKEYIKKNLIGALLFDGGNTAADRRLKRTSRRRYTRRRNRILYLQEIFAEEMSKVDDSFFHRLEDSFLVEEDKRGSKYPIFATLQEEKDYHEKFSTIYHLRKELADKKEKADLRLIYIALAHIIKFRGHFLIEDDSFDVRNTDISKQYQDFLEIFNTTFENNDLLSQNVDVEAILTDKISKSAKKDRILAQYPNQKSTGIFAEFLKLIVGNQADFKKYFNLEDKTPLQFAKDSYDEDLENLLGQIGDEFADLFSAAKKLYDSVLLSGILTVIDLSTKAPLSASMIQRYDEHREDLKQLKQFVKASLPEKYQEIFADSSKDGYAGYIEGKTNQEAFYKYLSKLLTKQEDSENFLEKIKNEDFLRKQRTFDNGSIPHQVHLTELKAIIRRQSEYYPFLKENQDRIEKILTFRIPYYIGPLAREKSDFAWMTRKTDDSIRPWNFEDLVDKEKSAEAFIHRMTNNDFYLPEEKVLPKHSLIYEKFTVYNELTKVRYKNEQGETYFFDSNIKQEIFDGVFKEHRKVSKKKLLDFLAKEYEEFRIVDVIGLDKENKAFNASLGTYHDLEKILDKDFLDNPDNESILEDIVQTLTLFEDREMIKKRLENYKDLFTESQLKKLYRRHYTGWGRLSAKLINGIRDKESQKTILDYLIDDGRSNRNFMQLINDDGLSFKSIISKAQAGSHSDNLKEVVGELAGSPAIKKGILQSLKIVDELVKVMGYEPEQIVVEMARENQTTNQGRRNSRQRYKLLDDGVKNLASNILKEYPTDNQALQNERLFLYYLQNGRDMYTGEALDIDNLSQYDIDHIIPQAFIKDDSIDNRVLVSSAKNRGKSDDVPSLEIVKDCKVFWKKLLDAKLMSQRKYDNLTKAERGGLTSDDKARFIQRQLVETRQITKHVARILDERFNNELDSKGRRIRKVKIVTLKSNLVSNFRKEFGFYKIREVNNYHHAHDAYLNAVVAKAILTKYPQLEPEFVYGDYPKYNSYKTRKATEKLFFYSNIMNFFKTKVTLADGTVVVKDDIEVNNDTGEIVWDKKKHFATVRKVLSYPQNNIVKKTEIQTGGFSKESILAHGNSDKLIPRKTKDIYLDPKKYGGFDSPIVAYSVLVVADIKKGKAQKLKTVTELLGITIMERSRFEKNPSAFLESKGYLNIRADKLIILPKYSLFELENGRRRLLASAGELQKGNELALPTQFMKFLYLASRYNESKGKPEEIEKKQEFVNQHVSYFDDILQLINDFSKRVILADANLEKINKLYQDNKENISVDELANNIINLFTFTSLGAPAAFKFFDKIVDRKRYTSTKEVLNSTLIHQSITGLYETRIDLGKLGED

SEQ ID NO: 65 - protein, 1365 aa, Streptococcus agalactiae
MNKPYSIGLDIGTNSVGYSVVTDDYKVPAKKMRVLGNTDKEYIKKNLIGALLFDGGNTASDRRLKRTARRRYTCRRNRILYLQEIFAEEMSKVDDSFFHRLEDSFLVEDDKRGSKYPIFATMQEEKDYHEKFPTIYHLRKELADKKEKANLRLVYLALAHIIKFRGHFLIEDDSFDVRNTDIQRQYQAFLEIFDTTFENNHLLSQNIDVEGILTDKISKSAKKDRILAQYPNQKSTGIFAEFLKLIVGNQADFKKHFNLEDKTPLQFAKDSYDEDLENLLGQIGDEFADLFSVAKKLYDSVLLSGILTVTDLSTKAPLSASMIQRYDEHREDLKQLKQFVKASLPEKYQEIFTDSSKDGYAGYIEGKTNQGAFYKYLSKLLTKQEGSEYFLEKIKNEDFLRKQRTFDNGSIPHQVHLTELKAIIRRQSEYYPFLKENLDRIEKILTFRIPYYVGPLAREKSDFAWMTRKTDDSIRPWNFEELVDKEASAEAFIHRMTNNDLYLPEEKVLPKHSLIYEKFTVYNELTKVRYKNEQGETYFFDSNIKQEIFDGVFKEHRKVSKKKLLDFLAKEYEEFRIVDVIGLDKENKAFNASLGTYHDLKKILDKDFLDNPDNESILEDIVQTLTLFEDREMIKKRLENYKDLFTESQLKKLYRRHYTGWGRLSAKLINGIRDKESQKTILDYLISDGRANRNFMQLIHDDGLSFKPIIDKAQAGSHSDNLKEVVGELAGSPAIKKGILQSLKIVDELVKVMGYEPEQVVVEMARENQTTNQGRRNTRQRYKLLEEGVKNLASNILKEYPTDNQALQNERLFLYYLQNGRDMYTGEALDIDNLSQYDIDHIVPQAFIKDDSIDNRVLVSSAKNRGKSDNVPSIDIVKARKAFWKKLLDAKLMSQRKYDNLTKAERGGLTSDDKARFIQRQLVETRQITKHVARILDERFNNELDSKGRRIRKVKIVTLKSNLVSNFRKEFGFYKIREVNDYHHAHDAYLNAVVAKAILTKYPQLEPEFVYGDYPKYNSYKTRKATEKLFFYSNIMNFFKTKVTLADGTVVVKDDIEVNNDTGEIVWDKKKHFATVRKVLSYPQVNIVKKTEIQTGGFSKESILAHGNSDKLIPRKTKDIYLDPKKYGGFDSPIVAYSVLVVADIKKGKAQKLKTVTELLGITIMERFRFEKNPSAFLESKGYLNIRDDKLMILPKYSLFELENGRRRLLASAGELQKGNELALPTQYMKFLYLASRYNELKGKPEEIEQKQEFVVQHVSYFDDILQIINDFSNRVILADANLEKINKLYQDNKENISVDELANNIINLFTFTSLGAPAAFKFFDKIVDRKRYTSTKEVLNSTLIHQSITGLYETRIDLGKLGED

SEQ ID NO: 66 - protein, 1365 aa, Streptococcus agalactiae
MNKPYSIGLDIGTNSVGYSVVTDDYKVPAKKMRVLGNTDKEYIKKNLIGALLFDGGNTASDRRLKRTARRRYTRRRNRILYLQEIFAEEMSKVDDSFFHRLEDSFLVEDDKRGSKYPIFATMQEEKDYHEKFPTIYHLRKELADKKEKADLRLVYLALAHIIKFRGHFLIEDDSFDVRNTDIQRQYQAFLEIFDTTFENNHLLSQNIDVEGILTDKISKSAKKDRILAQYPNQKSTGIFAEFLKLIVGNQADFKKHFNLEDKTPLQFAKDSYDEDLENLLGQIGDEFADLFSVAKKLYDSVLLSGILTVTDLSTKAPLSASMIQRYDEHREDLKQLKQFVKASLPEKYQEIFTDSSKDGYAGYIEGKTNQGAFYKYLSKLLTKQEGSEYFLEKIKNEDFLRKQRTFDNGSIPHQVHLTELKAIIRRQSEYYPFLKENLDRIEKILTFRIPYYVGPLAREKSDFAWMTRKTDDSIRPWNFEELVDKEASAEAFIHRMTNNDLYLPEEKVLPKHSLIYEKFTVYNELTKVRYKNEQGETYFFDSNIKQEIFDGVFKEHRKVSKKKLLDFLAKEYEEFRIVDVIGLDKENKAFNASLGTYHDLKKILDKDFLDNPDNESILEDIVQTLTLFEDREMIKKRLENYKDLFTESQLKKLYRRHYTGWGRLSAKLINGIRDKESQKTILDYLISDGRANRNFMQLIHDDGLSFKPIIDKAQAGSHSDNLKEVVGELAGSPAIKKGILQSLKIVDELVKVMGYEPEQVVVEMARENQTTNQGRRNTRQRYKLLEEGVKNLASNILKEYPTDNQALQNERLFLYYLQNGRDMYTGEALDIDNLSQYDIDHIVPQAFIKDDSIDNRVLVSSAKNRGKSDNVPSIDIVKARKAFWKKLLDAKLMSQRKYDNLTKAERGGLTSDDKARFIQRQLVETRQITKHVARILDERFNNELDSKGRRIRKVKIVTLKSNLVSNFRKEFGFYKIREVNDYHHAHDAYLNAVVAKAILTKYPQLEPEFVYGDYPKYNSYKTRKATEKLFFYSNIMNFFKTKVTLADGTVVVKDDIEVNNDTGEIVWDKKKHFATVRKVLSYPQVNIVKKTEIQTGGFSKESILAHGNSDKLIPRKTKDIYLDPKKYGGFDSPIVAYSVLVVADIKKGKAQKLKTVTELLGITIMERFRFEKNPSAFLESKGYLNIRDDKLMILPKYSLFELENGRRRLLASAGELQKGNELALPTQYMKFLYLASRYNELKGKPEEIEQKQEFVVQHVSYFDDILQIINDFSNRVILADANLEKINKLYQDNKENISVDELANNIINLFTFTSLGAPAAFKFFDKIVDRKRYTSTKEVLNSTLIHQSITGLYETRIDLGKLGED

SEQ ID NO: 67 - protein, 1365 aa, Streptococcus agalactiae
MNKPYSIGLDIGTNSVGYSVVTDDYKVPAKKMRVLGNTDKEYIKKNLIGALLFDGGNTASDRRLKRTARRRYTRRRNRILYLQEIFAEEMSKVDDSFFHRLEDSFLVEDDKRGSKYPIFATMQEEKDYHEKFPTIYHLRKELADKKEKADLRLVYLALAHIIKFRGHFLIEDDSFDVRNTDIQRQYQAFLEIFDTTFENNHLLSQNIDVEGILTDKISKSAKKDRILAQYPNQKSTGIFAEFLKLIVGNQADFKKHFNLEDKTPLQFAKDSYDEDLENLLGQIGDEFADLFSVAKKLYDSVLLSGILTVTDLSTKAPLSASMIQRYDEHREDLKQLKQFVKASLPEKYQEIFTDSSKDGYAGYIEGKTNQGAFYKYLSKLLTKQEGSEYFLEKIKNEDFLRKQRTFDNGSIPHQVHLTELKAIIRRQSEYYPFLKENLDRIEKILTFRIPYYVGPLAREKSDFAWMTRKTDDSIRPWNFEELVDKEASAEAFIHRMTNNDLYLPEEKVLPKHSLIYEKFTVYNELTKVRYKNEQGETYFFDSNIKQEIFDGVFKEHRKVSKKKLLDFLAKEYEEFRIVDVIGLDKENKAFNASLGTYHDLKKILDKDFLDNPDNESILEDIVQTLTLFEDREMIKKRLENYKDLFTESQLKKLYRRHYTGWGRLSAKLINGIRDKESQKTILDYLISDGRANRNFMQLIHDDGLSFKPIIDKAQAGSHSDNLKEVVGELAGSPAIKKGILQSLKIVDELVKVMGYEPEQVVVEMARENQTTNQGRRNTRQRYKLLEEGVKNLASNILKEYPTDNQALQNERLFLYYLQNGRDMYTGETLDIDNLSQYDIDHIVPQAFIKDDSIDNRVLVSSAKNRGKSDNVPSIDIVKARKAFWKKLLDAKLMSQRKYDNLTKAERGGLTSDDKARFIQRQLVETRQITKHVARILDERFNNELDSKGRRIRKVKIVTLKSNLVSNFRKEFGFYKIREVNDYHHAHDAYLNAVVAKAILTKYPQLEREFVYGDYPKYNSYKTRKATEKLFFYSNIMNFFKTKVTLADGTVVVKDDIEVNNDTGEIVWDKKKHFATVRKVLSYPQVNIVKKTEIQTGGFSKESILAHGNSDKLIPRKTKDIYLDPKKYGGFDSPIVAYSVLVVADIKKGKAQKLKTVTELLGITIMERFRFEKNPSAFLESKGYLNIRDDKLMILPKYSLFELENGRRRLLASAGELQKGNELALPTQYMKFLYLASRYNELKGKPEEIEQKQEFVVQHVSYFDDILQIINDFSNRVILADANLEKINKLYQDNKENISVDELANNIINLFTFTSLGAPAAFKFFDKIVDRKRYTSTKEVLNSTLIHQSITGLYETRIDLGKLGED

SEQ ID NO: 68 - protein, 1365 aa, Streptococcus agalactiae
MNKPYSIGLDIGTNSVGYSVVTDDYKVPAKKMRVLGNTDKEYIKKNLIGALLFDGGNTASDRRLKRTARRRYTRRRNRILYLQEIFAEEMSKVDDSFFHRLEDSFLVEDDKRGSKYPIFATMQEEKDYHEKFPTIYHLRKELADKKEKANLRLVYLALAHIIKFRGHFLIEDDSFDVRNTDIQRQYQAFLEIFDTTFENNHLLSQNIDVEGILTDKISKSAKKDRILAQYPNQKSTGIFAEFLKLIVGNQADFKKHFNLEDKTPLQFAKDSYDEDLENLLGQIGDEFADLFSVAKKLYDSVLLSGILTVTDLSTKAPLSASMIQRYDEHREDLKQLKQFVKASLPEKYQEIFTDSSKDGYAGYIEGKTNQGAFYKYLSKLLTKQEGSEYFLEKIKNEDFLRKQRTFDNGSIPHQVHLTELKAIIRRQSEYYPFLKENLDRIEKILTFRIPYYVGPLAREKSDFAWMTRKTDDSIRPWNFEELVDKEASAEAFIHRMTNNDLYLPEEKVLPKHSLIYEKFTVYNELTKVRYKNEQGETYFFDSNIKQEIFDGVFKEHRKVSKKKLLDFLAKEYEEFRIVDVIGLDKENKAFNASLGTYHDLKKILDKDFLDNPDNESILEDIVQTLTLFEDREMIKKRLENYKDLFTESQLKKLYRRHYTGWGRLSAKLINGIRDKESQKTILDYLISDGRANRNFMQLIHDDGLSFKPIIDKAQAGSHSDNLKEVVGELAGSPAIKKGILQSLKIVDELVKVMGYEPEQVVVEMARENQTTNQGRRNTRQRYKLLEEGVKNLASNILKEYPTDNQALQNERLFLYYLQNGRDMYTGEALDIDNLSQYDIDHIVPQAFIKDDSIDNRVLVSSAKNRGKSDNVPSIDIVKARKAFWKKLLDAKLMSQRKYDNLTKAERGGLTSDDKARFIQRQLVETRQITKHVARILDERFNNELDSKGRRIRKVKIVTLKSNLVSNFRKEFGFYKIREVNDYHHAHDAYLNAVVAKAILTKYPQLEPEFVYGDYPKYNSYKTRKATEKLFFYSNIMNFFKTKVTLADGTVVVKDDIEVNNDTGEIVWDKKKHFATVRKVLSYPQVNIVKKTEIQTGGFSKESILAHGNSDKLIPRKTKDIYLDPKKYGGFDSPIVAYSVLVVADIKKGKAQKLKTVTELLGITIMERFRFEKNPSAFLESKGYLNIRDDKLMILPKYSLFELENGRRRLLASAGELQKGNELALPTQYMKFLYLASRYNELKGKPEEIEQKQEFVVQHVSYFDDILQIINDFSNRVILADANLEKINKLYQDNKENISVDELANNIINLFTFTSLGAPAAFKFFDKIVDRKRYTSTKEVLNSTLIHQFITGLYETRIDLGKLGED

SEQ ID NO: 69 - protein, 1365 aa, Streptococcus agalactiae
MNKPYSIGLDIGTNSVGYSVVTDDYKVPAKKMRVLGNTDKEYIKKNLIGALLFDGGNTASDRRLKRTARRRYTRRRNRILYLQEIFAEEMSKVDDSFFHRLEDSFLVEDDKRGSKYPIFATMQEEKDYHEKFPTIYHLRKELADKKEKANLRLVYLALAHIIKFRGHFLIEDDSFDVRNTDIQRQYQAFLEIFDTTFENNHLLSQNIDVEGILTDKISKSAKKDRILAQYPNQKSTGIFAEFLKLIVGNQADFKKHFNLEDKTPLQFAKDSYDEDLENLLGQIGDEFADLFSVAKKLYDSVLLSGILTVTDLSTKAPLSASMIQRYDEHREDLKQLKQFVKASLPEKYQEIFTDSSKDGYAGYIEGKTNQGAFYKYLSKLLTKQEGSEYFLEKIKNEDFLRKQRTFDNGSIPHQVHLTELKAIIRRQSEYYPFLKENLDRIEKILTFRIPYYVGPLAREKSDFAWMTRKTDDSIRPWNFEELVDKEASAEAFIHRMTNNDLYLPEEKVLPKHSLIYEKFTVYNELTKVRYKNEQGETYFFDSNIKQEIFDGVFKEHRKVSKKKLLDFLAKEYEEFRIVDVIGLDKENKAFNASLGTYHDLKKILDKDFLDNPDNESILEDIVQTLTLFEDREMIKKRLENYKDLFTESQLKKLYRRHYTGWGRLSAKLINGIRDKESQKTILDYLISDGRANRNFMQLIHDDGLSFKPIIDKAQAGSHSDNLKEVVGELAGSPAIKKGILQSLKIVDELVKVMGYEPEQVVVEMARENQTTNQGRRNTRQRYKLLEEGVKNLASNILKEYPTDNQALQNERLFLYYLQNGRDMYTGEALDIDNLSQYDIDHIVPQAFIKDDSIDNRVLVSSAKNRGKSDNVPSIDIVKARKAFWKKLLDAKLMSQRKYDNLTKAERGGLTSDDKARFIQRQLVETRQITKHVARILDERFNNELDSKGRRIRKVKIVTLKSNLVSNFRKEFGFYKIREVNDYHHAHDAYLNAVVAKAILTKYPQLEPEFVYGDYPKYNSYKTRKATEKLFFYSNIMNFFKTKVTLADGTVVVKDDIEVNNDTGEIVWDKKKHFATVRKVLSYPQVNIVKKTEIQTGGFSKESILAHGNSDKLIPRKTKDIYLDPKKYGGFDSPIVAYSVLVVADIKKGKAQKLKTVTELLGITIMERFRFEKNPSAFLESKGYLNIRDDKLMILPKYSLFELENGRRRLLASAGELQKGNELALPTQYMKFLYLASRYNELKGKPEEIEQKQEFVVQHVSYFDDILQIINDFSNRVILADANLEKINKLYQDNKENISVDELANNIINLFTFTSLGAPAAFKFFDKIVDRKRYTSTKEVLNSTLIHQSITGLYETRIDLGKLGED

SEQ ID NO: 70 - protein, 1365 aa, Streptococcus agalactiae
MNKPYSIGLDIGTNSVGWSIITDDYKVPAKKMRVLGNTDKEYIKKNLIGALLFDGGNTAADRRLKRTARRRYTRRRNRILYLQEIFAEEMSKVDDSFFHRLEDSFLVEEDKRGSKYPIFATMQEEKDYHEKFPTIYHLRKELADKKEKADLRLVYLALAHIIKFRGHFLIEDDRFDVRNTDIQKQYQAFLEIFDTSFENNHLLSQNVDVEAILTDKISKSAKKDRILAQYPNQKSTGIFAEFLKLIVGNQADFKKHFNLEDKTPLQFAKDSYDEDLENLLGQIGDEFADLFSAAKKLYDSVLLSGILTVTDLSTKAPLSASMIQRYDEHREDLKQLKQFVKASLPEKYQEIFADSSKDGYAGYIEGKTNQEAFYKYLSKLLTKQEDSEYFLEKIKNEDFLRKQRTFDNGSIPHQVHLTELKAIIRRQSEYYPFLKENQDKIEKILTFRIPYYVGPLARGNSDFAWMTRKTDDSIRPWNFEDLVDKEKSAEAFIHRMTNNDLYLPEEKVLPKHSLIYEKFTVYNELTKVRYKNEQGETYFFDSNVKQEIFDGVFKEHRKVSKKQLLDFLAKEFEEFRIVDVTGLDKENKAFNASLGTYHDLKKILDKDFLDNPDNESILEDIVQTITLFEDREMIKKRLENYKDLFTESQLKKLYRRHYTGWGRLSAKLINGIRDRESQKTILDYLISDGRANRNFMQLINDDGLSFKSIISKAQSGSHSDNLKEVVGELAGSPAIKKGILQSLKIVDELVKVMGYEPEQIVVEMARENQTTNQGRRNSRQRYKLLEDGVKNLASDILKEYPTDNQALQNERLFLYYLQNGRDMYTGEALDIDNLSQYDIDHIVPQAFIKDDSIDNRVLVSSAKNRGKSDDVPSIDIVKARKAFWKKLLDAKLISQRKYDNLTKAERGGLTPDDKAGFIQRQLVETRQITKHVARILDERFNNKVDDNNKPIRKVKIVTLKSNLVSNFRKEFGFYKIREVNNYHHAHDAYLNAVVAKAILTKYPQLEPEFVYGDYPKYNSYKTRKATEKLFFYSNIMNFFKTKVTLADETVVVKDDIEVNNETGEIAWDKKKHFATVRKVLSYPQVNIVKKTEVQTGGFSKESILAHSNSDKLIPRKTKDIYLDPKKYGGFDSPIVAYSVLVLADIKKGKAQKLKTVKELIGITIMERERFEKNPSAFLESKGYLNIRTDKLIILPKYSLFELENGRRRLLASAGELQKGNELALPTQYMKFLYLASRYNESKGKPEEIEKKQEFVNQHVSYFDDILQLINDFSKRVILADANLEKINKLYSDNKDNTPVDELAKNIINLFTFTSLGAPAAFKFFDKSVDRKRYTSTKEVLDSTLIHQSITGLYETRIDLGKLGED

SEQ ID NO: 71 - protein, 1365 aa, Streptococcus agalactiae
MNKPYSIGLDIGTNSVGWSIITDDYKVPAKKMRVLGNTDKEYIKKNLIGALLFDGGNTAADRRLKRTARRRYTRRRNRILYLQEIFAEEMSKVDDSFFHRLEDSFLVEEDKRGSKYPIFATMQEEKYYHEKFPTIYHLRKELADKKEKADLRLIYLALAHIIKFRGHFLIEDDRFDVRNTDIQKQYQAFLEIFDTTFENNDLLSQNVDVEAILTDKISKSAKKDRILARYPNQKSTGIFAEFLKLIVGNQADFKKHFNLEDKTPLQFAKDSYDEDLENLLGQIGDEFADLFSAAKKLYDSVLLSGILTVTDLSTKAPLSASMIQRYDEHREDLKQLKQFVKASLPEKYQEIFADSSKDGYAGYIEGKTNQEAFYKYLSKLLTKQEGSEYLLEKIKNEDFLRKQRTFDNGSIPHQVHLTELRAIIRRQSEYYPFLKENLDRIEKILTFRIPYYVGPLAREKSDFAWMTRKTDDSIRPWNFEDLVDKEKSAEAFIHRMTNNDLYLPEEKVLPKHSLIYEKFTVYNELTKVRFLAEGFKDFQFLNRKQKETIFNSLFKEKRKVTEKDIISFLNKVDGYEGIAIKGIEKQFNASLSTYHDLKKILGKDFLDNTDNELILEDIVQTLTLFEDREMIRKRLDIYKDFFTESQLKKLYRRHYTGWGRLSAKLINGIRNKENQKTILDYLIDDGSANRNFMQLIKDAGLSFKPIIDKARTGSHSDNLKEVVGELAGSPAIKKGILQSLKIVDELVKVMGYEPEQIVVEMARENQTTAKGLSRLRQRLTTLRESLANLKSEKKPKYVKDQVENHHLSDDRLFLYYLQNGKDMYTDDELDIDNLSQYDIDLIIPQAFIKDDSIDNRVLVSSAKNRGKSDDVPSVEIVKDCKVFWKKLLDAKLMSQRKYDNLTKAERGGLTSDDKARFIQRQLVETRQITKHVARILDERFNNELDSKGRRIRKVKIVTLKSNLVSNFRKEFGFYKIREVNNYHHAHDAYLNAVVAKAILTKYPQLEPEFVYGDYPKYNSYKTRKATEKLFFYSNIMNFFKTKVTLADGTVVVKDDIEVNNDTGEIVWDKKKHFATVRKVLSYPQVNIVKKTEIQTGGFSKESILAHGNSDKLIPRKTKDIYLDPKKYGGFDSPIVAYSVLVVADIKKGKAQKLKTVTELLGITIMERSRFEKNPSAFLESKGYLNIRDDKLMILPKYSLFELENGRRRLLASADELQKGNELALPTQFMKFLYLASRYNELKGKPEEIEQKQEFVVQHVSYFDDILQIINDFSNRVILADANLEKINKLYQDNKENIPVDELANNIINLFTFTSLGAPAAFKFFDKIVDRKRYTSTKEVLNSTLIHQSITGLYETRIDLGKLGED

SEQ ID NO: 72 - protein, 1365 aa, Streptococcus agalactiae
MNKPYSIGLDIGTNSVGWSIITDDYKVPAKKMRVLGNTDKEYIKKNLIGALLFDGGNTASDRRLKRTARRRYTRRRNRILYLQEIFAEEMSKVDDSFFHRLEDSFLVEDDKRGSKYPIFATMQEEKDYHEKFPTIYHLRKELADKKEKADLRLFYLALAHIIKFRGHFLIEDDSFDVRNTDIQRQYQAFLEIFDTTFENNHLLSQNIDIEGILTDKISKSAKKDRILAQYPNQKSTGIFAEFLKLIVGNQADFKKHFNLEDKTPLQFAKDSYDEDLENLLGQIGDEFADLFSVAKKLYDSVLLSGILTVTDLSTKAPLSASMIQRYDEHREDLKQLKQFVKASLPEKYQEIFTDSSKDGYAGYIEGKTNQGAFYKYLSKLLTKQEGSEYFLEKIKNEDFLRKQRTFDNGSIPHQVHLTELKAIIRRQSEYYPFLKENLDRIEKILTFRIPYYVGPLAREKSDFAWMTRKTDDSIRPWNFEELVDKEASAEAFIHRMTNNDLYLPEEKVLPKHSLIYEKFTVYNELTKVRYKNEQGETYFFDSNIKQEIFDGVFKEHRKVSKKKLLDFLAKEYEEFRIVDVIGLDKENKAFNASLGTYHDLKKILDKDFLDNPDNESILEDIVQTLTLFEDREMIKKRLENYKDLFTESQLKKLYRRHYTGWGRLSAKLINGIRDKESQKTILDYLIDDGKSNRNFMQLIHDDGLSFKSIISKAQAGSHSDNLKEVVGELAGSPAIKKGILQSLKIVDELVKVMGYEPEQIVVEMARENQTTNQGRRNSRQRYKLLDDGVKNLASNILKEYPTDNQALQNERLFLYYLQNGRDMYTGKALDIDNLSQYDIDHIIPQAFIKDDSIDNRVLVSSAKNRGKSDDVPSLEIVKDCKVFWKKLLDAKLMSQRKYDNLTKAERGGLTSDDKARFIQRQLVETRQITKHVARILDERFNNELDSKGRRIRKVKIVTLKSNLVSNFRKEFGFYKIREVNNYHHAHDAYLNAVVAKAILTKYPQLEPEFVYGDYPKYNSYKTRKATEKLFFYSNIMNFFKTKVTLADGTVVVKDDIEVNNDTGEIVWDKKKHFATVRKVLSYPQVNIVKKTEIQTGGFSKESILAHGNSDKLIPRKTKDIYLDPKKYGGFDSPIVAYSVLVVADIKKGKAQKLKTVTELLGITIMERSRFEKNPSAFLESKGYLNIRDDKLMILPKYSLFELENGRRRLLASAGELQKGNELALPTQFMKFLYLASRYNELKGKPEEIEQKQEFVVQHVSYFDDILQIINDFSNRVILADANLEKINKLYQDNKENISVDELANNIINLFTFTSLGAPAAFKFFDKIVDRKRYTSTKEVLNSTLIHQSITGLYETRIDLGKLGED

SEQ ID NO: 73 - protein, 1365 aa, Streptococcus agalactiae
MNKPYSIGLDIGTNSVGWSIITDDYKVPAKKMRVLGNTDKEYIKKNLIGALLFDGGNTASDRRLKRTARRRYTRRRNRILYLQEIFAEEMSKVDDSFFHRLEDSFLVEDDKRGSKYPIFATMQEEKDYHEKFPTIYHLRKELADKKEKADLRLFYLALAHIIKFRGHFLIEDDSFDVRNTDIQRQYQAFLEIFDTTFENNHLLSQNIDVEGILTDKISKSAKKDRILAQYPNQKSTGIFAEFLKLIVGNQADFKKHFNLEDKTPLQFAKDSYDEDLENLLGQIGDEFADLFSVAKKLYDSVLLSGILTVTDLSTKAPLSASMIQRYDEHREDLKQLKQFVKASLPEKYQEIFTDSSKDGYAGYIEGKTNQGAFYKYLSKLLTKQEGSEYFLEKIKNEDFLRKQRTFDNGSIPHQVHLTELKAIIRRQSEYYPFLKENLDRIEKILTFRIPYYVGPLAREKSDFAWMTRKTDDSIRPWNFEELVDKEASAEAFIHRMTNNDLYLPEEKVLPKHSLIYEKFTVYNELTKVRYKNEQGETYFFDSNIKQEIFDGVFKEHRKVSKKKLLDFLAKEYEEFRIVDVIGLDKENKAFNASLGTYHDLKKILDKDFLDNPDNESILEDIVQTLTLFEDREMIKKRLENYKDLFTESQLKKLYRRHYTGWGRLSAKLINGIRDKESQKTILDYLIDDGKSNRNFMQLIHDDGLSFKSIISKAQAGSHSDNLKEVVGELAGSPAIKKGILQSLKIVDELVKVMGYEPEQIVVEMARENQTTNQGRRNSRQRYKLLDDGVKNLASNILKEYPTDNQALQNERLFLYYLQNGRDMYTGKALDIDNLSQYDIDHIIPQAFIKDDSIDNRVLVSSAKNRGKSDDVPSLEIVKDCKVFWKKLLDAKLMSQRKYDNLTKAERGGLTSDDKARFIQRQLVETRQITKHVARILDERFNNELDSKGRRIRKVKIVTLKSNLVSNFRKEFGFYKIREVNNYHHAHDAYLNAVVAKAILTKYPQLEPEFVYGDYPKYNSYKTRKATEKLFFYSNIMNFFKTKVTLADGTVVVKDDIEVNNDTGEIVWDKKKHFATVRKVLSYPQVNIVKKTEIQTGGFSKESILAHGNSDKLIPRKTKDIYLDPKKYGGFDSPIVAYSVLVVADIKKGKAQKLKTVTELLGITIMERSRFEKNPSAFLESKGYLNIRDDKLMILPKYSLFELENGRRRLLASAGELQKGNELALPTQFMKFLYLASRYNELKGKPEEIEQKQEFVVQHVSYFDDILQIINDFSNRVILADANLEKINKLYQDNKENISVDELANNIINLFTFTSLGAPAAFKFFDKIVDRKRYTSTKEVLNSTLIHQSITGLYETRIDLGKLGED

SEQ ID NO: 74 - protein, 1365 aa, Streptococcus agalactiae
MNKPYSIGLDIGTNSVGWSIITDDYKVPAKKMRVLGNTDKEYIKKNLIGALLFDGGNTAADRRLKRTARRRYTRRRNRILYLQEIFAEEMSKVDDSFFHRLEDSFLVEEDKRGSKYPIFATLQEEKDYHEKFPTIYHLRKELADKKEKADLRLIYIALAHIIKFRGHFLIEDDSFDVRNTDISKQYQDFLEIFNTTFENNDLLSQNVDVEAILTDKISKSAKKDRILAQYPNQKSTGIFAEFLKLIVGNQADFKKYFNLEDKTPLQFAKDSYDEDLENLLGQIGDEFADLFSAAKKLYDSVLLSGILTVIDLSTKAPLSASMIQRYDEHREDLKQLKQFVKASLPEKYQEIFADSSKDGYAGYIEGKTNQEAFYKYLSKLLTKQEDSENFLEKIKNEDFLRKQRTFDNGSIPHQVHLTELKAIIRRQSEYYPFLKENQDRIEKILTFRIPYYIGPLAREKSDFAWMTRKTDDSIRPWNFEDLVDKEKSAEAFIHRMTNNDFYLPEEKVLPKHSLIYEKFTVYNELTKVRYKNEQGETYFFDSNIKQEIFDGVFKEHRKVSKKKLLDFLAKEYEEFRIVDVIGLDKENKAFNASLGTYHDLEKILDKDFLDNPDNESILEDIVQTLTLFEDREMIKKRLENYKDLFTESQLKKLYRRHYTGWGRLSAKLINGIRDKESQKTILDYLIDDGRSNRNFMQLINDDGLSFKSIISKAQAGSHSDNLKEVVGELAGSPAIKKGILQSLKIVDELVKVMGYEPEQIVVEMARENQTTNQGRRNSRQRYKLLDDGVKNLASNILKEYPTDNQALQNERLFLYYLQNGRDMYTGEALDIDNLSQYDIDHIIPQAFIKDDSIDNRVLVSSAKNRGKSDDVPSLEIVKDCKVFWKKLLDAKLMSQRKYDNLTKAERGGLTSDDKARFIQRQLVETRQITKHVARILDERFNNELDSKGRRIRKVKIVTLKSNLVSNFRKEFGFYKIREVNNYHHAHDAYLNAVVAKAILTKYPQLEPEFVYGDYPKYNSYKTRKATEKLFFYSNIMNFFKTKVTLADGTVVVKDDIEVNNDTGEIVWDKKKHFATVRKVLSYPQNNIVKKTEIQTGGFSKESILAHGNSDKLIPRKTKDIYLDPKKYGGFDSPIVAYSVLVVADIKKGKAQKLKTVTELLGITIMERSRFEKNPSAFLESKGYLNIRADKLIILPKYSLFELENGRRRLLASAGELQKGNELALPTQFMKFLYLASRYNESKGKPEEIEKKQEFVNQHVSYFDDILQLINDFSKRVILADANLEKINKLYQDNKENISVDELANNIINLFTFTSLGAPAAFKFFDKIVDRKRYTSTKEVLNSTLIHQSITGLYETRIDLGKLGED

SEQ ID NO: 75 - protein, 1365 aa, Streptococcus agalactiae
MNKPYSIGLDIGTNSVGYSVVTDDYKVPAKKMRVLGNTDKEYIKKNLIGALLFDGGNTASDRRLKRTARRRYTRRRNRILYLQEIFAEEMSKVDDSFFHRLEDSFLVEDDKRGSKYPIFATMQEEKDYHEKFPTIYHLRKELADKKEKADLRLVYLALAHIIKFRGHFLIEDDSFDVRNTDIQRQYQAFLEIFDTTFENNHLLSQNIDVEGILTDKISKSAKKDRILAQYPNQKSTGIFAEFLKLIVGNQADFKKHFNLEDKTPLQFAKDSYDEDLENLLGQIGDEFADLFSVAKKLYDSVLLSGILTVTALSTKAPLSASMIQRYDEHREDLKQLKQFVKASLPEKYQEIFTDSSKDGYAGYIEGKTNQGAFYKYLSKLLTKQEGSEYFLEKIKNEDFLRKQRTFDNGSIPHQVHLTELKAIIRRQSEYYPFLKENLDRIEKILTFRIPYYVGPLAREKSDFAWMTRKTDDSIRPWNFEELVDKEASAEAFIHRMTNNDLYLPEEKVLPKHSLIYEKFTVYNELTKVRYKNEQGETYFFDSNIKQEIFDGVFKEHRKVSKKKLLDFLAKEYEEFRIVDVIGLDKENKAFNASLGTYHDLKKILDKDFLDNPDNESILEDIVQTLTLFEDREMIKKRLENYKDLFTESQLKKLYRRHYTGWGRLSAKLINGIRDKESQKTILDYLISDGRANRNFMQLIHDDGLSFKPIIDKAQAGSHSDNLKEVVGELAGSPAIKKGILQSLKIVDELVKVMGYEPEQVVVEMARENQTTNQGRRNTRQRYKLLEEGVKNLASNILKEYPTDNQALQNERLFLYYLQNGRDMYTGEALDIDNLSQYDIDHIVPQAFIKDDSIDNRVLVSSAKNRGKSDNVPSIDIVKARKAFWKKLLDAKLMSQRKYDNLTKAERGGLTSDDKARFIQRQLVETRQITKHVARILDERFNNELDSKGRRIRKVKIVTLKSNLVSNFRKEFGFYKIREVNDYHHAHDAYLNAVVAKAILTKYPQLEPEFVYGDYPKYNSYKTRKATEKLFFYSNIMNFFKTKVTLADGTVVVKDDIEVNNDTGEIVWDKKKHFATVRKVLSYPQVNIVKKTEIQTGGFSKESILAHGNSDKLIPRKTKDIYLDPKKYGGFDSPIVAYSVLVVADIKKGKAQKLKTVTELLGITIMERFRFEKNPSAFLESKGYLNIRDDKLMILPKYSLFELENGRRRLLASAGELQKGNELALPTQYMKFLYLASRYNELKGKPEEIEQKQEFVVQHVSYFDDILQIINDFSNRVILADANLEKINKLYQDNKENISVDELANNIINLFTFTSLGAPAAFKFFDKIVDRKRYTSTKEVLNSTLIHQSITGLYETRIDLGKLGED

SEQ ID NO: 76 - protein, 1365 aa, Streptococcus agalactiae
MNKPYSIGLDIGTNSVGWSIITDDYKVPAKKMRVLGNTDKEYIKKNLIGALLFDGGNTAADRRLKRTARRRYTRRRNRILYLQEIFAEEMSKVDDSFFHRLEDSFLVEEDKRGSKYPIFATLQEEKDYHEKFSTIYHLRKELADKKEKADLRLIYIALAHIIKFRGHFLIEDDSFDVRNTDISKQYQDFLEIFNTTFENNDLLSQNVDVEAILTDKISKSAKKDRILAQYPNQKSTGIFAEFLKLIVGNQADFKKYFNLEDKTPLQFAKDSYDEDLENLLGQIGDEFADLFSAAKKLYDSVLLSGILTVIDLSTKAPLSASMIQRYDEHREDLKQLKQFVKASLPEKYQEIFADSSKDGYAGYIEGKTNQEAFYKYLSKLLTKQEDSENFLEKIKNEDFLRKQRTFDNGSIPHQVHLTELKAIIRRQSEYYPFLKENQDRIEKILTFRIPYYIGPLAREKSDFAWMTRKTDDSIRPWNFEDLVDKEKSAEAFIHRMTNNDFYLPEEKVLPKHSLIYEKFTVYNELTKVRYKNEQGETYFFDSNIKQEIFDGVFKEHRKVSKKKLLDFLAKEYEEFRIVDVIGLDKENKAFNASLGTYHDLEKILDKDFLDNPDNESILEDIVQTLTLFEDREMIKKRLENYKDLFTESQLKKLYRRHYTGWGRLSAKLINGIRDKESQKTILDYLIDDGRSNRNFMQLINDDGLSFKSIISKAQAGSHSDNLKEVVGELAGSPAIKKGILQSLKIVDELVKVMGYEPEQIVVEMARENQTTNQGRRNSRQRYKLLDDGVKNLASNILKEYPTDNQALQNERLFLYYLQNGRDMYTGEALDIDNLSQYDIDHIIPQAFIKDDSIDNRVLVSSAKNRGKSDDVPSLEIVKDCKVFWKKLLDAKLMSQRKYDNLTKAERGGLTSDDKARFIQRQLVETRQITKHVARILDERFNNELDSKGRRIRKVKIVTLKSNLVSNFRKEFGFYKIREVNNYHHAHDAYLNAVVAKAILTKYPQLEPEFVYGDYPKYNSYKTRKATEKLFFYSNIMNFFKTKVTLADGTVVVKDDIEVNNDTGEIVWDKKKHFATVRKVLSYPQNNIVKKTEIQTGGFSKESILAHGNSDKLIPRKTKDIYLDPKKYGGFDSPIVAYSVLVAADIKKGKAQKLKTVTELLGITIMERSRFEKNPSAFLESKGYLNIRADKLIILPKYSLFELENGRRRLLASAGELQKGNELALPTQFMKFLYLASRYNESKGKPEEIEKKQEFVNQHVSYFDDILQLINDFSKRVILADANLEKINKLYQDNKENISVDELANNIINLFTFTSLGAPAAFKFFDKIVDRKRYTSTKEVLNSTLIHQSITGLYETRIDLGKLGED

SEQ ID NO: 77 - protein, 1365 aa, Streptococcus agalactiae
MNKPYSIGLDIGTNSVGWSIITDDYKVPAKKMRVLGNTDKEYIKKNLIGALLFDGGNTAADRRLKRTARRRYTRRRNRILYLQEIFAEEMSKVDDSFFHRLEDSFLVEEDKRGSKYPIFATLQEEKDYHEKFSTIYHLRKELADKKEKADLRLIYIALAHIIKFRGHFLIEDDSFDVRNTDISKQYQDFLEIFNTTFENNDLLSQNVDVEAILTDKISKSAKKDRILAQYPNQKSTGIFAEFLKLIVGNQADFKKYFNLEDKTPLQFAKDSYDEDLENLLGQIGDEFADLFSAAKKLYDSVLLSGILTVIDLSTKASLSDSMIQRYDEHREDLKQLKQFVKASLPEKYQEIFADSSKDGYAGYIEGKTNQEAFYKYLSKLLTKQEDSENFLEKIKNEDFLRKQRTFDNGSIPHQVHLTELKAIIRRQSEYYPFLKENQDRIEKILTFRIPYYIGPLAREKSDFAWMTRKTDDSIRPWNFEDLVDKEKSAEAFIHRMTNNDFYLPEEKVLPKHSLIYEKFTVYNELTKVRYKNEQGETYFFDSNIKQEIFDGVFKEHRKVSKKKLLDFLAKEYEEFRIVDVIGLDKENKAFNASLGTYHDLEKILDKDFLDNPDNESILEDIVQTLTLFEDREMIKKRLENYKDLFTESQLKKLYRRHYTGWGRLSAKLINGIRDKESQKTILDYLIDDGRSNRNFMQLINDDGLSFKSIISKAQAGSHSDNLKEVVGELAGSPAIKKGILQSLKIVDELVKVMGYEPEQIVVEMARENQTTNQGRRNSRQRYKLLDDGVKNLASNILKEYPTDNQALQNERLFLYYLQNGRDMYTGEALDIDNLSQYDIDHIIPQAFIKDDSIDNRVLVSSAKNRGKSDDVPSLEIVKDCKVFWKKLLDAKLMSQRKYDNLTKAERGGLTSDDKARFIQRQLVETRQITKHVARILDERFNNELDSKGRRIRKVKIVTLKSNLVSNFRKEFGFYKIREVNNYHHAHDAYLNAVVAKAILTKYPQLEPEFVYGDYPKYNSYKTRKATEKLFFYSNIMNFFKTKVTLADGTVVVKDDIEVNNDTGEIVWDKKKHFATVRKVLSYPQNNIVKKTEIQTGGFSKESILAHGNSDKLIPRKTKDIYLDPKKYGGFDSPIVAYSVLVVADIKKGKAQKLKTVTELLGITIMERSRFEKNPSAFLESKGYLNIRADKLIILPKYSLFELENGRRRLLASAGELQKGNELALPTQFMKFLYLASRYNESKGKPEEIEKKQEFVNQHVSYFDDILQLINDFSKRVILADANLEKINKLYQDNKENISVDELANNIINLFTFTSLGAPAAFKFFDKIVDRKRYTSTKEVLNSTLIHQSITGLYETRIDLGKLGED

SEQ ID NO: 78 - protein, 1365 aa, Streptococcus agalactiae
MNKPYSIGLDIGTNSVGWSIITDDYKVPAKKMRVLGNTDKEYIKKNLIGALLFDGGNTAADRRLKRTARRRYTRRRNRILYLQEIFAEEMSKVDDSFFHRLEDSFLVEEDKRGSKYPIFATLQEEKDYHEKFSTIYHLRKELADKKEKADLRLIYIALAHIIKFRGHFLIEDDSFDVRNTDISKQYQDFLEIFNTTFENNDLLSQNVDVEAILTDKISKSAKKDRILAQYPNQKSTGIFAEFLKLIVGNQADFKKYFNLEDKTPLQFAKDSYDEDLENLLGQIGDEFADLFSAAKKLYDSVLLSGILTVIDLSTKAPLSASMIQRYDEHREDLKQLKQFVKASLPEKYQEIFADSSKDGYAGYIEGKTNQEAFYKYLSKLLTKQEDSENFLEKIKNEDFLRKQRTFDNGSIPHQVHLTELKAIIRRQSEYYPFLKENQDRIEKILTFRIPYYIGPLAREKSDFAWMTRKTDDSIRPWNFEDLVDKEKSAEAFIHRMTNNDFYLPEEKVLPKHSLIYEKFTVYNELTKVRYKNEQGETYFFDSNIKQEIFDGVFKEHRKVSKKKLLDFLAKEYEEFRIVDVIGLDKENKAFNASLGTYHDLEKILDKDFLDNPDNESILEDIVQTLTLFEDREMIKKRLENYKDLFTESQLKKLYRRHYTGWGRLSAKLINGIRDKESQKTILDYLIDDGRSNRNFMQLINDDGLSFKSIISKAQAGSHSDNLKEVVGELAGSPAIKKGILQSLKIVDELVKVMGYEPEQIVVEMARENQTTNQGRRNSRQRYKLLDDGVKNLASNILKEYPTDNQALQNERLFLYYLQNGRDMYTGEALDIDNLSQYDIDHIIPQAFIKDDSIDNRVLVSSAKNRGKSDDVPSLEIVKDCKVFWKKLLDAKLMSQRKYDNLTKAERGGLTSDDKARFIQRQLVEIRQITKHVARILDERFNNELDSKGRRIRKVKIVTLKSNLVSNFRKEFGFYKIREVNNYHHAHDAYLNAVVAKAILTKYPQLEPEFVYGDYPKYNSYKTRKATEKLFFYSNIMNFFKTKVTLADGTVVVKDDIEVNNDTGEIVWDKKKHFATVRKVLSYPQNNIVKKTEIQTGGFSKESILAHGNSDKLIPRKTKDIYLDPKKYGGFDSPIVAYSVLVVADIKKGKAQKLKTVTELLGITIMERSRFEKNPSAFLESKGYLNIRADKLIILPKYSLFELENGRRRLLASAGELQKGNELALPTQFMKFLYLASRYNESKGKPEEIEKKQEFVNQHVSYFDDILQLINDFSKRVILADANLEKINKLYQDNKENISVDELANNIINLFTFTSLGAPAAFKFFDKIVDRKRYTSTKEVLNSTLIHQSITGLYETRIDLGKLGED

SEQ ID NO: 79 - protein, 1365 aa, Streptococcus agalactiae
MNKPYSIGLDIGTNSVGWSIITDDYKVPAKKMRVLGNTDKEYIKKNLIGALLFDGGNTAADRRLKRTARRRYTRRRNRILYLQEIFAEEMSKVDDSFFHRLEDSFLVEEDKRGSKYPIFATLQEEKDYHEKFSTIYHLRKELADKKEKADLRLIYIALAHIIKFRGHFLIEDDSFDVRNTDISKQYQDFLEIFNTTFENNDLLSQNVDVEAILTDKISKSAKKDRILAQYPNQKSTGIFAEFLKLIVGNQADFKKYFNLEDKTPLQFAKDSYDEDLENLLGQIGDEFADLFSAAKKLYDSVLLSGILTVIDLSTKAPLSASMIQRYDEHREDLKQLKQFVKASLPEKYQEIFADSSKDGYAGYIEGKTNQEAFYKYLSKLLTKQEDSENFLEKIKNEDFLRKQRTFDNGSIPHQVHLTELKAIIRRQSEYYPFLKENQDRIEKILTFRIPYYIGPLAREKSDFAWMTRKTDDSIRPWNFEDLVDKEKSAEAFIHRMTNNDFYLPEEKVLPKHSLIYEKFTVYNELTKVRYKNEQGETYFFDSNIKQEIFDGVFKEHRKVSKKKLLDFLAKEYEEFRIVDVIGLDKENKAFNASLGTYHDLEKILDKDFLDNPDNESILEDIVQTLTLFEDREMIKKRLENYKDLFTESQLKKLYRRHYTGWGRLSAKLINGIRDKESQKTILDYLIDDGRSNRNFMQLINDDGLSFKSIISKAQAGSHSDNLKEVVGELAGSPAIKKGILQSLKIVDELVKVMGYEPEQIVVEMARENQTTNQGRRNSRQRYKLLDDGVKNLASNILKEYPTDNQALQNERLFLYYLQNGRDMYTGEALDIDNLSQYDIDHIIPQAFIKDDSIDNRVLVSSAKNRGKSDDVPSLEIVKDCKVFWKKLLDAKLMSQRKYDNLTKAERGGLTSDDKARFIQRQLVETRQITKHVARILDERFNNELDSKGRRIRKVKIVTVKSNLVSNFRKEFGFYKIREVNNYHHAHDAYLNAVVAKAILTKYPQLEPEFVYGDYPKYNSYKTRKATEKLFFYSNIMNFFKTKVTLADGTVVVKDDIEVNNDTGEIVWDKKKHFATVRKVLSYPQNNIVKKTEIQTGGFSKESILAHGNSDKLIPRKTKDIYLDPKKYGGFDSPIVAYSVLVVADIKKGKAQKLKTVTELLGITIMERSRFEKNPSAFLESKGYLNIRADKLIILPKYSLFELENGRRRLLASAGELQKGNELALPTQFMKFLYLASRYNESKGKPEEIEKKQEFVNQHVSYFDDILQLINDFSKRVILADANLEKINKLYQDNKENISVDELANNIINLFTFTSLGAPAAFKFFDKIVDRKRYTSTKEVLNSTLIHQSITGLYETRIDLGKLGED

SEQ ID NO: 80 - protein, 1365 aa, Streptococcus agalactiae
MNKPYSIGLDIGTNSVGWSIITDDYKVPAKKMRVLGNTDKEYIKKNLIGALLFDGGNTAADRRLKRTARRRYTRRRNRILYLQEIFAEEMSKVDDSFFHRLEDSFLVEEDKRGSKYPIFATLQEEKDYHEKFSTIYHLRKELADKKEKADLRLIYIALAHIIKFRGHFLIEDDSFDVRNTDISKQYQDFLEIFNTTFENNDLLSQNVDVEAILTDKISKSAKKDRILAQYPNQKSTGIFAEFLKLIVGNQADFKKYFNLEDKTPLQFAKDSYDEDLENLLGQIGDEFADLFSAAKKLYDSVLLSGILTVIDLSTKAPLSASMIQRYDEHREDLKQLKQFVKASLPEKYQEIFADSSKDGYAGYIEGKTNQEAFYKYLSKLLTKQEDSENFLEKIKNEDFLRKQRTFDNGSIPHQVHLTELKAIIRRQSEYYPFLKENQDRIEKILTFRIPYYIGPLAREKSDFAWMTRKTDDSIRPWNFEDLVDKEKSAEAFIHRMTNNDFYLPEEKVLPKHSLIYEKFTVYNELTKVRYKNEQGETYFFDSNIKQEIFDGVFKEHRKVSKKKLLDFLAKEYEEFRIVDVIGLDKENKAFNASLGTYHDLEKILDKDFLDNPDNESILEDIVQTLTLFEDREMIKKRLENYKDLFTESQLKKLYRRHYTGWGRLSAKLINGIRDKESQKTILDYLIDDGRSNRNFMQLINDDGLSFKSIISKAQAGSHSDNLKEVVGELAGSPAIKKGILQSLKIVDELVKVMGYEPEQIVVEMARENQTTNQGRRNSRQRYKLLDDGVKNLASNILKEYPTDNQALQNERLFLYYLQNGRDMYTGEALDIDNLSQYDIDHIIPQAFIKDDSIDNRVLVSSAKNRGKSDDVPSLEIVKDCKVFWKKLLDAKLMSQRKYDNLTKAERGGLTSDDKARFIQRQLVETRQITKHVARILDELFNNELDSKGRRIRKVKIVTLKSNLVSNFRKEFGFYKIREVNNYHHAHDAYLNAVVAKAILTKYPQLEPEFVYGDYPKYNSYKTRKATEKLFFYSNIMNFFKTKVTLADGTVVVKDDIEVNNDTGEIVWDKKKHFATVRKVLSYPQNNIVKKTEIQTGGFSKESILAHGNSDKLIPRKTKDIYLDPKKYGGFDSPIVAYSVLVVADIKKGKAQKLKTVTELLGITIMERSRFEKNPSAFLESKGYLNIRADKLIILPKYSLFELENGRRRLLASAGELQKGNELALPTQFMKFLYLASRYNESKGKPEEIEKKQEFVNQHVSYFDDILQLINDFSKRVILADANLEKINKLYQDNKENISVDELANNIINLFTFTSLGAPAAFKFFDKIVDRKRYTSTKEVLNSTLIHQSITGLYETRIDLGKLGGD

SEQ ID NO: 81 - protein, 1365 aa, Streptococcus agalactiae; identical to SEQ ID NO: 50

SEQ ID NO: 82 - protein, 1365 aa, Streptococcus agalactiae
MNKPYSIGLDIGTNSVGYSVVTDDYKVPAKKMRVLGNTDKEYIKKNLIGALLFDGGNTASDRRLKRTARRRYTRRRNRILYLQEIFAEEMSKVDDSFFHRLEDSFLVEDDKRGSKYPIFATMQEEKDYHEKFPTIYHLRKELADKKEKANLRLVYLALAHIIKFRGHFLIEDDSFDVRNTDIQRQYQAFLEIFDTTFENNHLLSQNIDVEGILTDKISKSAKKDRILAQYPNQKSTGIFAEFLKLIVGNQADFKKHFNLEDKTPLQFAKDSYDEDLENLLGQIGDEFADLFSVAKKLYDSVLLSGILTVTDLSTKAPLSASMIQRYDEHREDLKQLKQFVKASLPEKYQEIFTDSSKDGYAGYIEGKTNQGAFYKYLSKLLTKQEGSEYFLEKIKNEDFLRKQRTFDNGSIPHQVHLTELKAIIRRQSEYYPFLKENLDRIEKILTFRIPYYVGPLAREKSDFAWMTRKTDDSIRPWNFEELVDKEASAEAFIHRMTNNDLYLPEEKVLPKHSLIYEKFTVYNELTKVRYKNEQGETYFFDSNIKQEIFDGVFKEHRKVSKKKLLDFLAKEYEEFRIVDVIGLDKENKAFNASLGTYHDLKKILDKDFLDNPDNESILEDIVQTLTLFEDREMIKKRLENYKDLFTESQLKKLYRRHYTGWGRLSAKLINGIRDKESQKTILDYLISDGRANRNFMQLIHDDGLSFKPIIDKAQAGSHSDNLKEVVGELAGSPAIKKGILQSLKIVDELVKVMGYEPEQVVVEMARENQTTNKGRRNTRQRYKLLEEGVKNLASNILKEYPTDNQALQNERLFLYYLQNGRDMYTGEALDIDNLSQYDIDHIVPQAFIKDDSIDNRVLVSSAKNRGKSDNVPSIDIVKARKAFWKKLLDAKLMSQRKYDNLTKAERGGLTSDDKARFIQRQLVETRQITKHVARILDERFNNELDSKGRRIRKVKIVTLKSNLVSNFRKEFGFYKIREVNDYHHAHDAYLNAVVAKAILTKYPQLEPEFVYGDYPKYNSYKTRKATEKLFFYSNIMNFFKTKVTLADGTVVVKDDIEVNNDTGEIVWDKKKHFATVRKVLSYPQVNIVKKTEIQTGGFSKESILAHGNSDKLIPRKTKDIYLDPKKYGGFDSPIVAYSVLVVADIKKGKAQKLKTVTELLGITIMERFRFEKNPSAFLESKGYLNIRDDKLMILPKYSLFELENGRRRLLASAGELQKGNELALPTQYMKFLYLASRYNELKGKPEEIEQKQEFVVQHVSYFDDILQIINDFSNRVILADANLEKINKLYQDNKENISVDELANNIINLFTFTSLGAPAAFKFFDKIVDRKRYTSTKEVLNSTLIHQSITGLYETRIDLGKLGED

SEQ ID NO: 83 - protein, 1365 aa, Streptococcus agalactiae
MNKPYSIGLDIGTNSVGWSIITDDYKVPAKKMRVLGNTDKEYIKKNLIGALLFDGRNTAADRRLKRTARRRYTRRRNRILYLQEIFAEEMSKVDDSFFHRLEDSFLVEEDKRGSKYPIFATLQEEKDYHEKFSTIYHLRKELADKKEKADLRLIYIALAHIIKFRGHFLIEDDSFDVRNTDISKQYQDFLEIFNTTFENNDLLSQNVDVEAILTDKISKSAKKDRILAQYPNQKSTGIFAEFLKLIVGNQADFKKYFNLEDKTPLQFAKDSYDEDLENLLGQIGDEFADLFSAAKKLYDSVLLSGILTVIDLSTKAPLSASMIQRYDEHREDLKQLKQFVKASLPEKYQEIFADSSKDGYAGYIEGKTNQEAFYKYLSKLLTKQEDSENFLEKIKNEDFLRKQRTFDNGSIPHQVHLTELKAIIRRQSEYYPFLKENQDRIEKILTFRIPYYIGPLAREKSDFAWMTRKTDDSIRPWNFEDLVDKEKSAEAFIHRMTNNDFYLPEEKVLPKHSLIYEKFTVYNELTKVRYKNEQGETYFFDSNIKQEIFDGVFKEHRKVSKKKLLDFLAKEYEEFRIVDVIGLDKENKAFNASLGTYHDLEKILDKDFLDNPDNESILEDIVQTLTLFEDREMIKKRLENYKDLFTESQLKKLYRRHYTGWGRLSAKLINGIRDKESQKTILDYLIDDGRSNRNFMQLINDDGLSFKSIISKAQAGSHSDNLKEVVGELAGSPAIKKGILQSLKIVDELVKVMGYEPEQIVVEMARENQTTNQGRRNSRQRYKLLDDGVKNLASNILKEYPTDNQALQNERLFLYYLQNGRDMYTGEALDIDNLSQYDIDHIIPQAFIKDDSIDNRVLVSSAKNRGKSDDVPSLEIVKDCKVFWKKLLDAKLMSQRKYDNLTKAERGGLTSDDKARFIQRQLVETRQITKHVARILDERFNNELDSKGRRIRKVKIVTLKSNLVSNFRKEFGFYKIREVNNYHHAHDAYLNAVVAKAILTKYPQLEPEFVYGDYPKYNSYKTRKATEKLFFYSNIMNFFKTKVTLADGTVVVKDDIEVNNDTGEIVWDKKKHFATVRKVLSYPQNNIVKKTEIQTGGFSKESILAHGNSDKLIPRKTKDIYLDPKKYGGFDSPIVAYSVLVVADIKKGKAQKLKTVTELLGITIMERSRFEKNPSAFLESKGYLNIRADKLIILPKYSLFELENGRRRLLASAGELQKGNELALPTQFMKFLYLASRYNESKGKPEEIEKKQEFVNQHVSYFDDILQLINDFSKRVILADANLEKINKLYQDNKENISVDELANNIINLFTFTSLGAPAAFKFFDKIVDRKRYTSTKEVLNSTLIHQSITGLYETRIDLGKLGED

SEQ ID NO: 84 - protein, 1365 aa, Streptococcus agalactiae
MNKPYSIGLDIGTNSVGWSIITDDYKVPAKKMRVLGNTDKEYIKKNLIGALLFDGGNTAADRRLKRTARRRYTRRRNRILYLQEIFAEEMSKVDDSFFHRLEDSFLVEEDKRGSKYPIFATMQEEKYYHEKFPTIYHLRKELADKKEKADLRLIYLALAHIIKFRGHFLIEDDSFDVRNTDIQKQYQAFLEIFDTTFENNDLLSQNVDVEAILTDKISKSAKKDRILARYPNQKSTGIFAEFLKLIVGNQADFKKHFNLEDKTPLQFAKDSYDEDLENLLGQIGDEFADLFSAAKKLYDSVLLSGILTVTDLSTKAPLSASMIQRYDEHREDLKQLKQFVKASLPEKYQEIFADSSKDGYAGYIEGKTNQEAFYKYLSKLLTKQEGSEYLLEKIKNEDFLRKQRTFDNGSIPHQVHLTELRAIIRRQSEYYPFLKENLDRIEKILTFRIPYYVGPLAREKSDFAWMTRKTDDSIRPWNFEDLVDKEKSAEAFIHRMTNNDLYLPEEKVLPKHSLIYEKFTVYNELTKVRFLAEGFKDFQFLNRKQKETIFNSLFKEKRKVTEKDIISFLNKVDGYEGIAIKGIEKQFNASLSTYHDLKKILGKDFLDNTDNELILEDIVQTLTLFEDREMIRKRLDIYKDFFTESQLKKLYRRHYTGWGRLSAKLINGIRNKENQKTILDYLIDDGSANRNFMQLIKDAGLSFKPIIDKARTGSHSDNLKEVVGELAGSPAIKKGILQSLKIVDELVKVMGYEPEQIVVEMARENQTTAKGLSRSRQRLTTLRESLANLKSEKKPKYVKDQVENHHLSDDRLFLYYLQNGKDMYTDDELDIDNLSQYDIDHIIPQAFIKDDSIDNRVLVSSAKNRGKSDDVPSVEIVKDCKVFWKKLLDAKLMSQRKYDNLTKAERGGLTSDDKARFIQRQLVETRQITKHVARILDERFNNELDSKGRRIRKVKIVTLKSNLVSNFRKEFGFYKIREVNNYHHAHDAYLNAVVAKAILTKYPQLEPEFVYGDYPKYNSYKTRKATEKLFFYSNIMNFFKTKVTLADGTVVVKDDIEVNNDTGEIVWDKKKHFATVRKVLSYPQVNIVKKTEIQTGGFSKESILAHGNSDKLIPRKTKDIYLDPKKYGGFDSPIVAYSVLVVADIKKGKAQKLKTVTELLGITIMERSRFEKNPSAFLESKGYLNIRDDKLMILPKYSLFELENGRRRLLASAGELQKGNELALPTQFMKFLYLASRYNELKGKPEEIEQKQEFVVQHVSYFDDILQIINDFSNRVILADANLEKINKLYQDNKENIPVDELANNIINLFTFTSLGAPAAFKFFDKIVDRKRYTSTKEVLNSTLIHKSITGLYETRIDLGKLGED

SEQ ID NO: 85 - protein, 1365 aa, Streptococcus agalactiae
MNKPYSIGLDIGTNSVGWSIITDDYKVPAKKMRVLGNTDKEYIKKNLIGALLFDGGNTAADRRLKRTARRRYTRRRNRILYLQEIFAEEMSKVDDSFFHRLEDSFLVEEDKRGSKYPIFATLQEEKDYHEKFSTIYHLRKELADKKEKADLRLIYIALAHIIKFRGHFLIEDDSFDVRNTDISKQYQDFLEIFNTTFENNDLLSQNVDVEAILTDKISKSAKKDRILAQYPNQKSTGIFAEFLKLIVGNQADFKKYFNLEDKTPLQFAKDSYDEDLENLLGQIGDEFADLFSAAKKLYDSVLLSGILTVIDLSTKAPLSASMIQRYDEHREDLKQLKQFVKASLPEKYQEIFADSSKDGYAGYIEGKTNQEAFYKYLSKLLTKQEDSENFLEKIKNEDFLRKQRTFDNGSIPHQVHLTELKAIIRRQSEYYPFLKENQDRIEKILTFRIPYYIGPLAREKSDFAWMTRKTDDSIRPWNFEDLVDKEKSAEAFIHRMTNNDFYLPEEKVLPKHSLIYEKFTVYNELTKVRYKNEQGETYFFDSNIKQEIFDGVFKEHRKVSKKKLLDFLAKEYEEFRIVDVIGLDKENKAFNASLGTYHDLEKILDKDFLDNPDNESILEDIVQTLTLFEDREMIKKRLENYKDLFTESQLKKLYRRHYTGWGRLSAKLINGIRDKESQKTILDYLIDDGRSNRNFMQLINDDGLSFKSIISKAQAGSHSDNLKEVVGELAGSPAIKKGILQSLKIVDELVKVMGYEPEQIVVEMARENQTTNQGRRNSRQRYKLLDDGVKNLASNILKEYPTDNQALQNERLFLYYLQNGRDMYTGEALDIDNLSQYDIDHIIPQAFIKDDSIDNRVLVSSAKNRGKSDDVPSLEIVKDCKVFWKKLLDAKLMSQRKYDNLTKAERGGLTSDDKARFIQRQLVETRQITKHVARILDERFNNELDSKGRRIRKVKIVTLKSNLVSNFRKEFGFYKIREVNNYHHAHDAYLNAVVAKAILTKYPQLEPEFVYGDYPKYNSYKTRKATEKLFFYSNIMNFFKTKVTLADGTVVIKDDIEVNNDTGEIVWDKKKHFATVRKVLSYPQNNIVKKTEIQTGGFSKESILAHGNSDKLIPRKTKDIYLDPKKYGGFDSPIVAYSVLVVADIKKGKAQKLKTVTELLGITIMERSRFEKNPSAFLESKGYLNIRADKLIILPKYSLFELENGRRRLLASAGELQKGNELALPTQFMKFLYLASRYNESKGKPEEIEKKQEFVNQHVSYFDDILQLINDFSKRVILADANLEKINKLYQDNKENISVDELANNIINLFTFTSLGAPAAFKFFDKIVDRKRYTSTKEVLNSTLIHQSITGLYETRIDLGKLGED

SEQ ID NO: 86 - protein, 1365 aa, Streptococcus agalactiae
MNKPYSIGLDIGTNSVGWSIITDDYKVPAKKMRVLGNTDKEYIKKNLIGALLFDGGNTAADRRLKRTARRRYTRRRNRILYLQEIFAEEMSKVDDSFFHRLEDSFLVEEDKRGSKYPIFATLQEEKDYHEKFSTIYHLRKELADKKEKADLRLIYIALAHIIKFRGHFLIEDDSFDVRNTDISKQYQDFLEIFNTTFENNDLLSQNVDVEAILTDKISKSAKKDRILAQYPNQKSTGIFAEFLKLIVGNQADFKKYFNLEDKTPLQFAKDSYDEDLENLLGQIGDEFADLFSAAKKLYDSVLLSGILTVIDLSTKAPLSASMIQRYDEHREDLKQLKQFVKASLPEKYQEIFADSSKDGYAGYIEGKTNQEAFYKYLSKLLTKQEDSENFLEKIKNEDFLRKQRTFDNGSIPHQVHLTELKAIIRRQSEYYPFLKENQDRIEKILTFRIPYYIGPLAREKSDFAWMTRKTDDSIRPWNFEDLVDKEKSAEAFIHRMTNNDFYLPEEKVLPKHSLIYEKFTVYNELTKVRYKNEQGETYFFDSNIKQEIFDGVFKEHRKVSKKKLLDFLAKEYEEFRIVDVIGLDKENKAFNASLGTYHDLEKILDKDFLDNPDNESILEDIVQTLTLFEDREMIKKRLENYKDLFTESQLKKLYRRHYTGWGRLSAKLINGIRDKESQKTILDYLIDDGRSNRNFMQLINDDGLSFKSIISKAQAGSHSDNLKEVVGELAGSPAIKKGILQSLKIVDELVKVMGYEPEQIVVEMARENQTTNQGRRNSRQRYKLLDDGVKNLASNILKEYPTDNQALQNERLFLYYLQNGRDMYTGEALDIDNLSQYDIDHIIPQAFIKDDSIDNRVLVSSAKNRGKSDDVPSLEIVKDCKVFWKKLLDAKLMSQRKYDNLTKAERGGLTSDDKARFIQRQLVETRQITKHVASILDERFNNELDSKGRRIRKVKIVTLKSNLVSNFRKEFGFYKIREVNNYHHAHDAYLNAVVAKAILTKYPQLEPEFVYGDYPKYNSYKTRKATEKLFFYSNIMNFFKTKVTLADGTVVVKDDIEVNNDTGEIVWDKKKHFATVRKVLSYPQNNIVKKTEIQTGGFSKESILAHGNSDKLIPRKTKDIYLDPKKYGGFDSPIVAYSVLVVADIKKGKAQKLKTVTELLGITIMERSRFEKNPSAFLESKGYLNIRADKLIILPKYSLFELENGRRRLLASAGELQKGNELALPTQFMKFLYLASRYNESKGKPEEIEKKQEFVNQHVSYFDDILQLINDFSKRVILADANLEKINKLYQDNKENISVDELANNIINLFTFTSLGAPAAFKFFDKIVDRKRYTSTKEVLNSTLIHQSITGLYETRIDLGKLGED

SEQ ID NO: 87 - protein, 1365 aa, Streptococcus agalactiae
MNKPYSIGLDIGTNSVGYSVVTDDYKVPAKKMRVLGNTDKEYIKKNLIGALLFDGGNTASDRRLKRTARRRYTRRRNRILYLQEIFAEEMSKVDDSFFHRLEDSFLVEDDKRGSKYPIFATMQEEKDYHEKFPTIYHLRKELADKKEKANLRLVYLALAHIIKFRGHFLIEDDSFDVRNTDIQRQYQAFLEIFDTTFENNHLLSQNIDVEGILTDKISKSAKKDRILAQYPNQKSTGIFAEFLKLIVGNQADFKKHFNLEDKTPLQFAKDSYDEDLENLLGQIGDEFADLFSVAKKLYDSVLLSGILTVTDLSTKAPLSASMIQRYDEHREDLKQLKQFVKASLPEKYQEIFTDSSKDGYAGYIESKTNQGAFYKYLSKLLTKQEGSEYFLEKIKNEDFLRKQRTFDNGSIPHQVHLTELKAIIRRQSEYYPFLKENLDRIEKILTFRIPYYVGPLAREKSDFAWMTRKTDDSIRPWNFEELVDKEASAEAFIHRMTNNDLYLPEEKVLPKHSLIYEKFTVYNELTKVRYKNEQGETYFFDSNIKQEIFDGVFKEHRKVSKKKLLDFLAKEYEEFRIVDVIGLDKENKAFNASLGTYHDLKKILDKDFLDNPDNESILEDIVQTLTLFEDREMIKKRLENYKDLFTESQLKKLYRRHYTGWGRLSAKLINGIRDKESQKTILDYLISDGRANRNFMQLIHDDGLSFKPIIDKAQAGSHSDNLKEVVGELAGSPAIKKGILQSLKIVDELVKVMGYEPEQVVVEMARENQTTNQGRRNTRQRYKLLEEGVKNLASNILKEYPTDNQALQNERLFLYYLQNGRDMYTGEALDIDNLSQYDIDHIVPQAFIKDDSIDNRVLVSSAKNRGKSDNVPSIDIVKARKAFWKKLLDAKLMSQRKYDNLTKAERGGLTSDDKARFIQRQLVETRQITKHVARILDERFNNELDSKGRRIRKVKIVTLKSNLVSNFRKEFGFYKIREVNDYHHAHDAYLNAVVAKAILTKYPQLEPEFVYGDYPKYNSYKTRKATEKLFFYSNIMNFFKTKVTLADGTVVVKDDIEVNNDTGEIVWDKKKHFATVRKVLSYPQVNIVKKTEIQTGGFSKESILAHGNSDKLIPRKTKDIYLDPKKYGGFDSPIVAYSVLVVADIKKGKAQKLKTVTELLGITIMERFRFEKNPSAFLESKGYLNIRDDKLMILPKYSLFELENGRRRLLASAGELQKGNELALPTQYMKFLYLASRYNELKGKPEEIEQKQEFVVQHVSYFDDILQIINDFSNRVILADANLEKINKLYQDNKENISVDELANNIINLFTFTSLGAPAAFKFFDKIVDRKRYTSTKEVLNSTLIHQSITGLYETRIDLGKLGED

SEQ ID NO: 88 - protein, 1365 aa, Streptococcus agalactiae
MNKPYSIGLDIGTNSVGWSIITDDYKVPAKKMRVLGNTDKEYIKKNLIGALLFDGGNTAADRRLKRTARRRYTRRRNRILYLQEIFAEEMSKVDDSFFHRLEDSFLVEEDKRGSKYPIFATLQEEKDYHEKFSTIYHLRKELADKKEKADLRLIYIALAHIIKFRGHFLIEDDSFDVRNTDISKQYQDFLEIFNTTFENNDLLSQNVDVEAILTDKISKSAKKDRILAQYPNQKSTGIFAEFLKLIVGNQADFKKYFNLEDKTPLQFAKDSYDEDLENLLGQIGDEFADLFSAAKKLYDSVLLSGILTVIDLSTKAPLSASMIQRYDEHREDLKQLKQFVKASLPEKYQEIFADSSKDGYAGYIEGKTNQEAFYKYLSKLLTKQEDSENFLEKIKNEDFLRKQRTFDNGSIPHQVHLTELKAIIRRQSEYYPFLKENQDRIEKILTFRIPYYIGPLAREKSDFAWMTRKTDDSIRPWNFEDLVDKEKSAEAFIHRMTNNDFYLPEEKVLPKHSLIYEKFTVYNELTKVRYKNEQGETYFFDSNIKQEIFDGVFKEHRKVSKKKLLDFLAKEYEEFRIVDVIGLDKENKAFNASLGTYHDLEKILDKDFLDNPDNESILEDIVQTLTLFEDREMIKKRLENYKDLFTESQLKKLYRRHYTGWGRLSAKLINGIRDKESQKTILDYLIDDGRSNRNFMQLINDDGLSFKSIISKAQAGSHSDNLKEVVGELAGSPAIKKGILQSLKIVDELVKVMGYEPEQIVVEMARENQTTNQGRRNSRQRYKLLDDGVKNLASNILKEYPTDNQALQNERLFLYYLQNGRDMYTGEALDIDNLSQYDIDHIIPQAFIKDDSIDNRVLVSSAKNRGKSDDVPSLEIVKDCKVFWKKLLDAKLMSQRKYDNLTKAERGGLTSDDKARFIQRQLVETRQITKHVARILDERFNNELDSKGRRIRKVKIVTLKSNLVSNFRKEFGFYKIREVNNYHHAHDAYLNAVVAKAILTKYPQLEPEFVYGDYPKYNSYKTRKATEKLFFYSNIMNFFKTKVTLADGTVVVKDDIEVNNDTGEIVWDKKKHFATVRKVLSYPQNNIVKKTEIQTGGFSKESILAHGNSDKLIPRKTKDIYLDPKKYGGFDSPIVAYSVLVVADIKKGKAQKLKTVTELLGITIMERSRFEKNLSAFLESKGYLNIRADKLIILPKYSLFELENGRRRLLASAGELQKGNELALPTQFMKFLYLASRYNESKGKPEEIEKKQEFVNQHVSYFDDILQLINDFSKRVILADANLEKINKLYQDNKENISVDELANNIINLFTFTSLGAPAAFKFFDKIIDRKRYTSTKEVLNSTLIHQSITGLYETRIDLGKLGED

SEQ ID NO: 89 - protein, 1365 aa, Streptococcus agalactiae
MNKPYSIGLDIGTNSVGWSIITDDYKVPAKKMRVLGNTDKEYIKKNLIGALLFDGGNTAADRRLKRTARRRYTRRRNRILYLQEIFAEEMSKVDDSFFHRLEDSFLVEEDKRGSKYPIFATLQEEKDYHEKFSTIYHLRKELADKKEKADLRLIYIALAHIIKFRGHFLIEDDSFDVRNTDISKQYQDFLEIFNTTFENNDLLSQNVDVEAILTDKISKSAKKDRILAQYPNQKSTGIFAEFLKLIVGNQADFKKYFNLEDKTPLQFAKDSYDEDLENLLGQIGDEFADLFSAAKKLYDSVLLSGILTVIDLSTKAPLSASMIQRYDEHREDLKQLKQFVKASLPEKYQEIFADSSKDGYAGYIEGKTNQEAFYKYLSKLLTKQEDSENFLEKIKNEDFLRKQRTFDNGSIPHQVHLTELKDIIRRQSEYYPFLKENQDRIEKILTFRIPYYIGPLAREKSDFAWMTRKTDDSIRPWNFEDLVDKEKSAEAFIHRMTNNDFYLPEEKVLPKHSLIYEKFTVYNELTKVRYKNEQGETYFFDSNIKQEIFDGVFKEHRKVSKKKLLDFLAKEYEEFRIVDVIGLDKENKAFNASLGTYHDLEKILDKDFLDNPDNESILEDIVQTLTLFEDREMIKKRLENYKDLFTESQLKKLYRRHYTGWGRLSAKLINGIRDKESQKTILDYLIDDGRSNRNFMQLINDDGLSFKSIISKAQAGSHSDNLKEVVGELAGSPAIKKGILQSLKIVDELVKVMGYEPEQIVVEMARENQTTNQGRRNSRQRYKLLDDGVKNLASNILKEYPTDNQALQNERLFLYYLQNGRDMYTGEALDIDNLSQYDIDHIIPQAFIKDDSIDNRVLVSSAKNRGKSDDVPSLEIVKDCKVFWKKLLDAKLMSQRKYDNLTKAERGGLTSDDKARFIQRQLVETRQITKHVARILDERFNNELDSKGRRIRKVKIVTLKSNLVSNFRKEFGFYKIREVNNYHHAHDAYLNAVVAKAILTKYPQLEPEFVYGDYPKYNSYKTRKATEKLFFYSNIMNFFKTKVTLADGTVVVKDDIEVNNDTGEIVWDKKKHFATVRKVLSYPQNNIVKKTEIQTGGFSKESILAHGNSDKLIPRKTKDIYLDPKKYGGFDSPIVAYSVLVVADIKKGKAQKLKTVTELLGITIMERSRFEKNPSAFLESKGYLNIRADKLIILPKYSLFELENGRRRLLASAGELQKGNELALPTQFMKFLYLASRYNESKGKPEEIEKKQEFVNQHVSYFDDILQLINDFSKRVILADANLEKINKLYQDNKENISVDELANNIINLFTFTSLGAPAAFKFFDKIVDRKRYTSTKEVLNSTLIHQSITGLYETRIDLGKLGED

SEQ ID NO: 90 - protein, 1365 aa, Streptococcus agalactiae
MNKPYSIGLDIGTNSVGWSIITDDYKVPAKKMRVLGNTDKEYIKKNLIGALLFDGGNTAADRRLKRTARRRYTRRRNRILYLQEIFAEEMSKVDDSFFHRLEDSFLVEEDKRGSKYPIFATMQEEKDYHEKFPTIYHLRKELADKKEKADLRLVYLALAHIIKFRGHFLIEDDRFDVRNTDIQKQYQAFLEIFDTSFENNHLLSQNVDVEAILTDKISKSAKKDRILAQYPNQKSTGIFAEFLKLIVGNQADFKKHFNLEDKTPLQFAKDSYDEDLENLLGQIGDEFADLFSAAKKLYDSVLLSGILTVTDLSTKAPLSASMIQRYDEHREDLKQLKQFVKASLPEKYQEIFADSSKDGYAGYIEGKTNQEAFYKYLSKLLTKQEDSEYFLEKIKNEDFLRKQRTFDNGSIPHQVHLTELKAIIRRQSEYYPFLKENQDKIEKILTFRIPYYVGPLARGNSDFAWMTRKTDDSIRPWNFEDLVDKEKSAEAFIHRMTNNDLYLPEEKVLPKHSLIYEKFTVYNELTKVRYKNEQGETYFFDSNVKQEIFDGVFKEHRKVSKKQLLDFLAKEFEEFRIVDVTGLDKENKAFNASLGTYHDLKKILDKDFLDNPDNESILEDIVQTITLFEDREMIKKRLENYKDLFTESQLKKLYRRHYTGWGRLSAKLINGIRDRESQKIILDYLISDGRANRNFMQLINDDGLSFKSIISKAQSGSHSDNLKEVVGELAGSPAIKKGILQSLKIVDELVKVMGYEPEQIVVEMARENQTTNQGRRNSRQRYKLLEDGVKNLASDILKEYPTDNQALQNERLFLYYLQNGRDMYTGEALDIDSLSQYDIDHIVPQAFIKDDSIDNRVLVSSAKNRGKSDDVPSIDIVKARKAFWKKLLDAKLISQRKYDNLTKAERGGLTPDDKAGFIQRQLVETRQITKHVARILDERFNNKVDDNNKPIRKVKIVTLKSNLVSNFRKEFGFYKIREVNNYHHAHDAYLNAVVAKAILTKYPQLEPEFVYGDYPKYNSYKTRKATEKLFFYSNIMNFFKTKVTLADETVVVKDDIEVNNETGEIAWDKKKHFATVRKVLSYPQVNIVKKTEVQTGGFSKESILAHSNSDKLIPRKTKDIYLDPKKYGGFDSPIVAYSVLVLADIKKGKAQKLKTVKELIGITIMERERFEKNPSAFLESKGYLNIRTDKLIILPKYSLFELENGRRRLLASAGELQKGNELALPTQYMKFLYLASRYNESKGKPEEIEKKQEFVNQHVSYFDDILQLINDFSKRVILADANLEKINKLYSDNKDNTPVDELAKNIINLFTFTSLGAPAAFKFFDKSVDRKRYTSTKEVLDSTLIHQSITGLYETRIDLGKLGED

SEQ ID NO: 91 - protein, 1365 aa, Streptococcus agalactiae
  VARIANT (9)..(9): Xaa can be any naturally occurring amino acid
MNKPYSIGXDIGTNSVGWSIITDDYKVPAKKMRVLGNTDKEYIKKNLIGALLFDGGNTAADRRLKRTARRRYTRRRNRILYLQEIFAEEMSKVDDSFFHRLEDSFLVEEDKRGSKYPIFATLQEEKDYHEKFSTIYHLRKELADKKEKADLRLIYIALAHIIKFRGHFLIEDDSFDVRNTDISKQYQDFLEIFNTTFENNDLLSQNVDVEAILTDKISKSAKKDRILAQYPNQKSTGIFAEFLKLIVGNQADFKKYFNLEDKTPLQFAKDSYDEDLENLLGQIGDEFADLFSAAKKLYDSVLLSGILTVIDLSTKAPLSASMIQRYDEHREDLKQLKQFVKASLPEKYQEIFADSSKDGYAGYIEGKTNQEAFYKYLSKLLTKQEDSENFLEKIKNEDFLRKQRTFDNGSIPHQVHLTELKAIIRRQSEYYPFLKENQDRIEKILTFRIPYYIGPLAREKSDFAWMTRKTDDSIRPWNFEDLVDKEKSAEAFIHRMTNNDFYLPEEKVLPKHSLIYEKFTVYNELTKVRYKNEQGETYFFDSNIKQEIFDGVFKEHRKVSKKKLLDFLAKEYEEFRIVDVIGLDKENKAFNASLGTYHDLEKILDKDFLDNPDNESILEDIVQTLTLFEDREMIKKRLENYKDLFTESQLKKLYRRHYTGWGRLSAKLINGIRDKESQKTILDYLIDDGRSNRNFMQLINDDGLSFKSIISKAQAGSHSDNLKEVVGELAGSPAIKKGILQSLKIVDELVKVMGYEPEQIVVEMARENQTTNQGRRNSRQRYKLLDDGVKNLASNILKEYPTDNQALQNERLFLYYLQNGRDMYTGEALDIDNLSQYDIDHIIPQAFIKDDSIDNRVLVSSAKNRGKSDDVPSLEIVKDCKVFWKKLLDAKLMSQRKYDNLTKAERGGLTSDDKARFIQRQLVETRQITKHVARILDERFNNELDSKGRRIRKVKIVTLKSNLVSNFRKEFGFYKIREVNNYHHAHDAYLNAVVAKAILTKYPQLEPEFVYGDYPKYNSYKTRKATEKLFFYSNIMNFFKTKVTLADGTVVVKDDIEVNNDTGEIVWDKKKHFATVRKVLSYPQNNIVKKTEIQTGGFSKESILAHGNSDKLIPRKTKDIYLDPKKYGGFDSPIVAYSVLVVADIKKGKAQKLKTVTELLGITIMERSRFEKNPSAFLESKGYLNIRADKLIILPKYSLFELENGRRRLLASAGELQKGNELALPTQFMKFLYLASRYNESKGKPEEIEKKQEFVNQHVSYFDDILQLINDFSKRVILADANLEKINKLYQDNKENISVDELANNIINLFTFTSLGAPAAFKFFDKIVDRKRYTSTKEVLNSTLIHQSITGLYETRIDLGKLGED

SEQ ID NO: 92 - protein, 1365 aa, Streptococcus agalactiae
MNKPYSIGLDIGTNSVGWSIITDDYKVPAKKMRVLGNTDKEYIKKNLIGALLFDGGNTAADRRLKRIARRRYTRRRNRILYLQEIFAEKMSKVDDSFFHRLEDSFLVEEDKRGSKYPIFATLQEEKDYHEKFPTIYHLRKELADKKEKADLRLVYLALAHIIKFRGHFLIEDDRFDVRNTDIQKQYQAFLEIFDTTFENNHLLSQNVDVEAILTDKISKSAKKDRILAQYPDQKSTGIFAEFLKLIVGNQADFKKHFNLEDKTPLQFAKDSYDEDLENLLGQIGDEFADLFSAAKKLYDSVLLSGILTVTDLSTKAPLSASMIQRYDEHREDLKQLKQFVKASLPEKYQEIFADSSKDGYAGYIEGKTNQEAFYKYLSKLLTKQEGSEYLLEKIKNEDFLRKQRTFDNGSIPHQVHLTELRAIIRRQSEYYPFLKENLDRIEKILTFRIPYYVGPLAREKSDFAWMTRKTDDSIRPWNFEELVDKEASAEAFIHCMTNNDLYLPEEKVLPKHSLIYEKFTVYNELTKVRYKNEQGETYFFDSNIKQEIFDGVFKEYRKVSKKQLLDFLAKEFEEFRIVDVTGLDKENKAFNASLGTYHDLEKILGKDFLDNPDNESILEDIVQTLTLFEDREMIKKRLDIYKDFFTESQLKKLYRRHYTGWGRLSAKLINGIRNKENQKTILDYLIDDGSANRNFMQLIKDAGLSFKSIISKAQSGSHSDNLKEVVSELAGSPAIKKGILQSLKIVDELVKVMGYKPEQIVVEMARENQTTNQGRRNSRQRYKLLDDGVRNLASNILKEYPTDNQALQNERLFLYYLQNGRDMYTEKALDIDNLSQYDIDHIIPQAFIKDDSIDNRVLVSSAKNRGKSDDVPSLEIVKDCKVFWKKLLDAKLMSQRKYDNLTKAERGGLTSDDKARFIQRQLVETRQITKHVARILDERFNNELDSKGRRIRKVKIVTLKSNLVSNFRKEFGFYKIREVNDYHHAHDAYLNAVVAKAILTKYPQLEPEFVYGDYPKYNSYKTRKATEKLFFYSNIMNFFKTKVTLADGTVVVKDDIEVNNDTGEIVWDKKKHFATVRKVLSYPQNNIVKKTEIQTGGFSKESILAHGNSDKLIPRKTKDIYLDPKKYGGFDSPIVAYSVLVVADIKKGKAQKLKTVTELLGITIMERSRFEKNPSAFLESKGYLNIRTDKLIILPKYSLFELENGRRRLLASAGELQKGNELALPTQFMKFLYLASRYNESKGKPEEIEKKQEFVNQHVSYFDDILQIINDFSNRVILADANLEKINKLYQDNKENISVDELANNIINLFTFTSLGAPAAFKFFDKIVDRKRYTSTKEVLNSTLIHQSITGLYETRIDLGKLGED

SEQ ID NO: 93 - protein, 1351 aa, Streptococcus anginosus
MNQKYSIGLDIGTNSVGWAVITDDYKVPAKKMKVLGNTDKQSIKKNLLGALLFDSGETAEATRLKRTARRRYTRRRNRLRYLQEIFAEEMMQVDESFFQRLDDSFLVDEDKRGERHPIFGNIAAEVKYHDEFPTIYHLRKHLADISQKADLRLVYLALAHMIKFRGHFLIEGQLKAENTNVQALFKDFVEVYDKTVEESHLSEITVDALSILTEKVSKSRRLENLIAHYPAEKKNTLFGNLIALFLGLQPNFKTNFQLSEDAKLQFSKDTYEEDLEGLLGEVGDEYADLFASAKNLYDAILLSGILTVDDNSTKAPLSASMVKRYEEHQKDLKKFEDFIKVNALDQYNAIFKDKNKKGYAGYIESGVKQDEFYKYLKGILLQINGSGDFLDKIDREDFLRKQRTFDNGSIPHQIHLQEMHAILRRQGEHYPFLKENQDKIEKILTFRIPYYVGPLARKGSRFAWAEYKADEKITPWNFDDILDKEKSAEKFITRMTLNDLYLPEEKVLPKHSLLYETFTVYNELTKVKYVNEQGEAKFFDANMKQEIFDHVFKENRKVTKDKLLNYLNKEFEEFRIVNLTGLDKENKVFNSSLGTYHDLRKILNKSFLDNKENAQIIEDIIQTLTLFEDREMIRQRLQKYSDIFTKAQLKKLERRHYTGWGRLSYKLINGIRNKENKKTILDYLIDDGYANRNFMQLINDDALSFKEEIAKAQIIGDVDDIANVVHDLPGSPAIKKGILQSVKIVDELVKVMGHNPANIIIEMARENQTTDRGRRNSQQRLKLLQDSLKPVNIKNVENQQLQNDRLFLYYIQNGKDMYTGETLDINNLSQYDIDHIIPQAYIKDDSFDNRVLTSSSENRGKSDNVPSIEVVCARKADWMRLRKAGLISQRKFDNLTKAERGGLTENDKAGFIKRQLVETRQITKHVAQVLDARFNAKHDENKKVIRDVKIITLKSNLVSQFRKDFKFYKVREINDYHHAHDAYLNAVIGTALLKKYPKLASEFVYGEFKKYDVSDKEIGKATAKYFFYSNLMNFFKKEVKFADGTVVERPDIETSEDGEIAWNKQTDFKIVRKVLSYPQVNIVKKTEVQTHGLDRPSPKPKPDSSENLVGVKRNLDPKKYGGYAGISNSYAVLVKAIIEKGVKKKETMVLEFQGISILDRITFEKDKRAFLLGKGYKDIKKIIELPKYSLFELKDGSRRMLASRGEIHKGNELFVPQKFTTLLYHAKRINNPINKDHIEYVKKHRDDFKELLNYVLEFNEKYVGATKNGERLKEAVADFDSKSNEEICTSFLGLFELTSLGSASDFEFLGVKIPRYRDYTPSSLLKDSTLIHQSITGLYETRIDLSKLGED

SEQ ID NO: 94 - protein, 1341 aa, Streptococcus anginosus
MKKEYSIGLDIGTNSVGWAVITDDYKVPAKKMKVLGNTDKQSIKKNLLGALLFDSGETAEATRLKRTARRRYTRRKNRLRYLQEIFTEEMNKVDENFFQRLDDSFLVEEDKQGSKYPIFGTLKEEKEYHKKFKTIYHLREELANSKEKADLRLVYLALAHMIKFRGHFLYEGDLKAENTDVQALFKDFVEEYDKTIEESHLSEITVDALSILTEKVSKSSRLENLIAHYPTEKKNTLFGNLIALSLGLQPNFKTNFQLSEDAKLQFSKDTYEEDLEELLGEIGDEYADLFASAKNLYDAILLSGILAVDDNTTKAPLSASMVKRYEEHQKDLKKLKDFIKVNAPDQYNAIFKDKNKKGYAGYIESGVEQDEFYKYLKGILLKINGSGDFLDKIDCEDFLRKQRTFDNGSIPHQIHLQEMHAILRRQGEHYPFLKENQDKIEKILTFRIPYYVGPLARKGSRFAWAEYKADEKITPWNFDDILDKEKSAEKFITRMTLNDLYLPEEKVLPKHSPLYETFTVYNELTKVKYVNEQGEAKFFDTNMKQEIFDHVFKENRKVTKDKLLNYLNKEFEEFRIVNLTGLDKENKAFNSSLGTYHDLRKILDKSFLDDKANEKTIEDIIQTLTLFEDREMIRQRLQKYSDIFTKAQLKKLERRHYTGWGRLSYKLINGIRNKENKKTILDYLIDDGYANRNFMQLINDDALSFKEEIARAQIIGDVDDIANVVHDLPGSPAIKKGILQSVKIVDELVKVMGHNPANIIIEMARENQTTDKGRRNSQQRLKLLQDSLKPVNIKNVENQQLQNDRLFLYYIQNGKDMYTGETLDINNLSQYDIDHIIPQAFIKDNSLDNRVLTRSDKNRGKSDDVPSIEVVHEMKSFWSKLLSVKLITQRKFDNLTKAERGGLTEEDKAGFIKRQLVETRQITKHVAQILDERFNTEFDGAQRRIRNVKIITLKSNLVSNFRKEFELYKVREINDYHHAHDAYLNAVVGNALLLKYPQLEPEFVYGEYPKYNSYRSRKSATEKFLFYSNILRFFKKEDIQTNEDGEIAWNKEKHIKILRKVLSYPQVNIVKKTEEQTGGFSKESILPKGESDKLIPRKTKNSYWNPKKYGGFDSPVVAYSILVFADVEKGKSKKLRKVQDMVGITIMEKKRFEKNPVDFLEQRGYRNVRLEKIIKLPKYSLFELENKRRRLLASARELQKGNELVIPQRFTTLLYHSYQIEKNYEPEHREYVEKHKDEFKELLEYISVFSRKYVLADNNLTKIEMLFSKNKDAEVSSLAKSFISLLTFTAFGAPAAFNFFGENIDRKRYTSVTECLNATLIHQSITGLYETRIDLSKLGED

SEQ ID NO: 95 - protein, 1341 aa, Streptococcus anginosus
MKKEYSIGLDIGTNSVGWAVITDDYKVPAKKMKVLGNTDKQSIKKNLLGALLFDSGETAEATRLKRTARRRYTRRRNRLRYLQEIFAEEMMQVDESFFQRLDDSFLVEEDKRGSRYPIFGNIAAEVKYHDDFPTIYHLRKHLVDISQKADLRLVYLALAHMIKFRGHFLIEGQLKAENTNVQALFKDFVEVYDKTVEESHLSEMTVDALSILTEKVSKSRRLENLVECYPTEKKNTLFGNLIALSLGLQPNFKTNFQLSEDAKLQFSKDTYEEDLEGLLGEIGDEYADLFASAKNLYDAILLSGILAVDDNTTKAPLSASMVKRYEEHQKDLKKLKDFIKVNAPAQYDDIFKDETKNGYAGYIENGVKQDEFYKYLKNTLSKIDGSDYFLDKIDREDFLRKQRTFDNGSIPHQIHLQEMHAILRRQGEHYPFLKENQDKIEKILTFRIPYYVGPLARKGSRFAWAEYKADEKITPWNFDDILDKEKSAEKFITRMTLNDLYLPEEKVLPKHSPLYETFTVYNELTKVKYVNEQGEAKFFDTNMKQEIFDHVFKENRKVTKDKLLNYLNKEFEEFRIVNLTGLDKENKAFNASLGTYHDLRKILDKSFLDDKVNEKIIEDIIQTLTLFEDREMIRQRLQKYSDIFTTQQLKKLERRHYTGWGRLSYKLINGIRNKENKKTILDYLIDDGYANRNFMQLINDDALSFKEEIARAQIIGDVDDIANVVHDLPGSPAIKKGILQSVKIVDELVKVMGHNPANIIIEMARENQTTDKGRRNSQQRLKLLQDSLKPVNIKNVENQQLQNDRLFLYYIQNGKDMYTGETLDINNLSQYDIDHIIPQAFIKDNSLDNRVLTRSDKNRGKSDDVPSIEVVHEMKSFWSKLLSVKLITQRKFDNLTKAERGGLTEEDKAGFIKRQLVETRQITKHVAQILDERFNTEFDGAQRRIRNVKIITLKSNLVSNFRKEFELYKVREINDYHHAHDAYLNAVVGNALLLKYPQLEPEFVYGEYPKYNSYRSRKSATEKFLFYSNILRFFKKEDIQTNEDGEIAWNKEKHIKILRKVLSYPQVNIVKKTEEQTGGFSKESILPKGESDKLIPRKTKNSYWNPKKYGGFDSPVVAYSILVFADVEKGKSKKLRKVQDMVGITIMEKKRFEKHPVDFLEQRGYRNVRLEKIIKLPKYSLFELENKRRRLLASARELQKGNELVIPQRFTTLLYHSYRIEKDYEPEHREYVEKHKDEFKELLEYISVFSRKYVLADNNLTKIEMLFSKNKDAEVSSLAKSFISLLTFTAFGAPAAFNFFGENIDRKRYTSVTECLNATLIHQSITGLYETRIDLSKLGED

SEQ ID NO: 96 - protein, 1341 aa, Streptococcus anginosus; identical to SEQ ID NO: 94

SEQ ID NO: 97 - protein, 1360 aa, Streptococcus caballi
MTKKNYSIGLDIGTNSVGWAVITDDYKVPAKKMKVLGNTDKKYIKKNLLGALLFDSGETAEATRLKRTARRRYTRRKNRLRYLQDIFTEEMAKVDDSFFQRLDESFLTDNDKNFDSHPIFGNKAEEDAYHQKFPTIYHLRKHLADSTEKADLRLVYLALAHMIKFRGHFLIEGELNAENTDVQKLFTDFVGVYDRTFDDSHLSEITVDAASILTEKISKSRRLENLINNYPKEKKNTLFGNLIALALGLQPNFKTNFKLSEDAKLQFSKDTYEEDLEELLGKIGDDYADLFTSSKNLYDAILLSGILTVDDNSTKAPLSASMIKRYVEHHEDLEKLKEFIKANKSELYHDIFKDKTQNGYAGYIENGVKQDEFYKYLKGILTKINGSDYFLDKIEREDFLRKQRTFDNGSIPHQIHLQEMHAILRRQGDYYPFLKENQEEIEKILTFRIPYYVGPLARKDSRFAWAEYRSDEKITPWNFDKVIDKEKSAEKFITRMTLNDLYLPEEKVLPKHSHVYETFAVYNELTKVKYVNEQGKDSFFDSNMKQEIFDHVFKENRKVTKEKLLNYLDKEFPEYRIQDLVGLDKENKSFNASLGTYHDLKKILDKSFLDDKVNEEVIEDIIKTLTLFEDREMIQQRLQKYSDIFTKQQLKKLERRHYTGWGRLSYKLINGIRNKENNKTILDYLIDDGSANRNFMQLINDDALSFKQIIQEAQVVGDVDDIETVVHDLPGSPAIKKGILQSVKIVDELIKVMGDNPDNIVIEMARENQTTNRGRSQSQQRLKKLQNSLKPSYIEDKVENSHLQNDQLFLYYIQNGKDMYTGDELDIDHLSDYDIDHIIPQAFIKDDSIDNRVLTSSAKNRGKSDDVPSLGIVRARKAEWVRLYKSGLISKRKFDNLTKAERGGLTEADKAGFIKRQLVETRQITKHVAQILDARFNTERDENDKVIRDVKVITLKSNLVSQFRKEFKFYKVREINDYHHAHDAYLNAVVGTALLKKYPKLAPEFVYGEYKKYDVSSDDHSEMGKATAKYFFYSNLMNFFKRVIRYSNGKVIVRPVVEYSKDTGEIAWNKRTDFEKVRKVLSYPQVNIVKKVETQTGGFSKESILPKGDSDKLIPRKTKKVLWEPKKYGGFDSPTVAYSVLVVADVEKGKTKKLKTVKELVGISIMERSFFEKNPVEFLKNKGYQNVQEDKLMKLPKYSLFEFEGGRRRLLASATELQKGNEIMLSAHLVALLYHAHRIGNFNSAEHLKYVSEHKKEFEEVLSCVENFANVYVDVEKNLSKIRAAADSMDNFSIEEISDSFINLLTLTALGAPADFNFLGEKIPRKRYNSTKECLNATLIHQSITGLYETRIDLSKLGEE

SEQ ID NO: 98 - protein, 1355 aa, Streptococcus canis
MEKKYSIGLDIGTNSVGWAVITDDYKVPSKKFKVLGNTNRKSIKKNLMGALLFDSGETAEATRLKRTARRRYTRRKNRIRYLQEIFANEMAKLDDSFFQRLEESFLVEEDKKNERHPIFGNLADEVAYHRNYPTIYHLRKKLADSPEKADLRLIYLALAHIIKFRGHFLIEGKLNAENSDVAKLFYQLIQTYNQLFEESLDEIEVDAKGILSARLSKSKRLEKLIAVFPNEKKNGLFGNIIALALGLTPNFKSNFDLTEDAKLQLSKDTYDDDLDELLGQIGDQYADLFSAAKNLSDAILLSDILRSNSEVTKAPLSASMVKRYDEHHQDLALLKTLVRQQFPEKYAEIFKDDTKNGYAGYVGIGATQEEFYKFIKPILEKMDGAEELLAKLNRDDLLRKQRTFDNGSIPHQIHLKELHAILRRQEEFYPFLKENREKIEKILTFRIPYYVGPLARGNSRFAWLTRKSEEAITPWNFEEVVDKGASAQSFIERMTNFDEQLPNKKVLPKHSLLYEYFTVYNELTKVKYVTERMRKPEFLSGEQKKAIVDLLFKTNRKVTVKQLKEDYFKKIECFDSVEIIGVEDRFNASLGTYHDLLKIIKDKDFLDNEENEDILEDIVLTLTLFEDREMIEERLKTYAHLFDDKVMKQLKRRHYTGWGRLSRKMINGIRDKQSGKTILDFLKDGFSNRNFMQLIHDDSLTFKEEIEKAQVSGQGDSLHEQIADLAGSPAIKKGILQTVKIVDELVKVMGHKPENIVIEMARENQTTTKGLQQSRERKKRIEEGIKELESQILKENPVENTQLQNEKLYLYYLQNGRDMYVDQELDINRLSDYDVDHIVPQSFIKDDSIDNKVLTRSVENRGKSDNVPSEEVVKKMKNYWRQLLNAKLITQRKFDNLTKAERGGLSEADKAGFIKRQLVETRQITKHVARILDSRMNTKRDKNDKPIREVKVITLKSKLVSDFRKDFQLYKVRDINNYHHAHDAYLNAVVGTALIKKYPKLESEFVYGDYKVYDVSEQEIGKATAKRFFYSNIMNFFKTEVKLANGEIRKRPLIETNGETGEVVWNKEKDFATVRKVLAMPQVNIVKKTEVQTGGFSKESILSKRESAKLIPRKKGWDTRKYGGFGSPTVAYSILVVAKVEKGKAKKLKSVKVLVGITIMEKGSYEKDPIGFLEAKGYKDIKKELIFKLPKYSLFELENGRRRMLASELQKANELVLPQHLVRLLYYTQNISATTGSNNLGYIEQHREEFKEIFEKIIDFSEKYILKNKVNSNLKSSFDEQFAVSDSILLSNSFVSLLKYTSFGASGGFTFLDLDVKQGRLRYQTVTEVLDATLIYQSITGLYETRTDLSQLGGD

SEQ ID NO: 99 - protein, 1341 aa, Streptococcus constellatus
MGKPYSIGLDIGTNSVGWAVVTDDYKVPAKKMKVLGNTDKQSIKKNLLGALLFDSGETAEATRLKRTARRRYTRRKNRLRYLQEIFTGEMNKVDENFFQRLDDSFLVDEDKRGEHHPIFGNIAAEVKYHDDFPTIYHLRRHLADTSKKADLRLVYLALAHMIKFRGHFLYEGDLKAENTDVQALFKDFVEEYDKTIEESHLSEITVDALSILTEKVSKSSRLENLIAHYPTEKKNTLFGNLIALSLDLHPNFKTNFQLSEDAKLQFSKDTYEEDLEGFLGEVGDEYADLFASAKNLYDAILLSGILTVDDNSTKAPLSASMVKRYEEHQKDLKKLKDFIKVNAPDQYNAIFKDKNKKGYASYIESGVKQDEFYKYLKGILLKINGSGDFLDKIDREDFLRKQRTFDNGSIPHQIHLQEMHAILRRQGEHYPFLKENQDKIEKILTFRIPYYVGPLARKGSRFAWAEYKADEKITPWNFDDILDKEKSAEKFITRMTLNDLYLPEEKVLPKHSPLYEAFTVYNELTKVKYVNEQGEAKFFDTNMKQEIFDHVFKENRKVTKDKLLNYLNKEFEEFRIVNLTGLDKENKAFNSSLGTYHDLRKILDKSFLDDKANEKTIEDIIQTLTLFEDREMIRQRLQKYSDIFTKAQLKKLERRHYTGWGRLSYKLINGIRNKENKKTILDYLIDDGYANRNFMQLINDDALSFKEEIARAQIIDDVDDIANVVHDLPGSPAIKKGILQSVKIVDELVKVMGHNPANIIIEMARENQTTDKGRRNSQQRLKLLQDSLKPVNIKNVENQQLQNDRLFLYYIQNGKDMYTGETLDINNLSQYDIDHIIPQAFIKDNSLDNRVLTRSDKNRGKSDDVPSIEVVHEMKSFWSKLLSVKLITQRKFDNLTKAERGGLTEEDKAGFIKRQLVETRQITKHVAQILDERFNTEFDGNKRRIRNVKIITLKSNLVSNFRKEFELYKVREINDYHHAHDAYLNAVVGNALLLKYPQLEPEFVYGEYPKYNSYRSRKSATEKFLFYSNILRFFKKEDIQTNEDGEIAWNKEKHIKILRKVLSYPQVNIVKKTEEQTGGFSKESILPKGESDKLIPRKTKNSYWDPKKYGGFDSPVVAYSILVFADVEKGKSKKLRKVQDMVGITIMEKKRFEKNPVDFLEQRGYRNVRLEKIIKLPKYSLFELENKRRRLLASAKELQKGNELVIPQRFTTLLYHSYRIEKDYEPEHREYVEKHKDEFKELLEYISVFSRKYVLADNNLTKIEMLFSKNKDAEVSSLAKSFISLLTFTAFGAPAAFNFFGENIDRKRYTSVTECLNATLIHQSITGLYETRIDLSKLGED

SEQ ID NO: 100 - protein, 1355 aa, Streptococcus constellatus
MTQKYSIGLDIGTNSVGWAIVTDDYKVPAKKMKILGNTNKQYIKKNLLGALLFDSGETAKATRLKRTARRRYTRRKNRLRYLQEIFIEEMNKVDENFFQRLDDSFLVTEDKRGSKYPIFGTLKEEKEYYKEFETIYHLRKRLADSTGKVDLRLVYLALAHMIKFRGHFLIEGQLKAENTDVQTLFNDFVEVYDKTIEESHLAEITVDALSILTEKVSKSRRLENLVKCYPTEKKNTLFGNLIALSLGLQPNFKTNFQLSEDAKLQFSKDTYEEDLEELLGKIGDDYADLFTSAKNLYDTILLSGILAVDDNSTKALLSASMIKRYEEHQKDLKKLKDFIKVNAPAQYDDIFKDETKNGYAGYIENGVKQDEFYKYLKNTLSKIDGSGYFLDKIEREDFLRKQRTFDNGSIPHQIHLQEMHAILRRQGEHYPFLKENQDKIEKILTFRIPYYVGPLVRKGSRFAWAEYKADEKITPWNFDDILDKEKSAEKFITRMTLNDLYLPEEKVLPKHSLLYEIFTVYNELTKVKYVNEQGEAKFFDANMKQEIFDHVFKENPKVTKDKLLNYLDKEFDEFRIVDLTGLDKENKAFNASLGTYHDLRKILDKSFLDDKANEKTIEDIIQTLTLFEDREMIRQRLQKYSDIFTKAQLKKLERRHYTGWGRLSYKLINGIRNKENNKTILEYLVDDGYANRNFMQLINDDTLPFKQIIKDAQAIDDVDDIELIVHDLPGSPAIKKGILQSIKIVDELVKVMGYNPDNIVIEMARENQTTTKGRRNSQQRLKLLQDSLTPVSIKNVENQQLQNDRLFLYYIQNGKDMYTGEELDIHHLSDYDIDHIIPQAFIKDDSIDNRVLTSSAKNRGKSDNVPNLEVVCDRKADWIRLREAGLISQRKFDNLTKAERGGLTENDKAGFIHRQLVETRQITKHVAQILDARFNPKRDDNKKVIRDVKIITLKSNLVSQFRRDFKLYKVREINDYHHAHDAYLNAVVGTALLKKYPKLTSEFVYGEYKKYDVSDNDEIGKATAKYFFYSNLMNFFKTEVKFADGTVVERPDIETSEDGEIAWNKQTDFKIVRKVLSYPQVNIVKKVEKQTGRFSKESILPKGDSDKLIARKTKENYWDTKKYGGFDSPTVAYSVLVVADIKKGKAKKLKTVKELVGISIMERPFFEKNPIMFLESKGYRNIQKDKLIKLPKYSLFEFEGGRRRLLASAVELQKGNEMVLPQYLNNLLYHAHRIDNSDNSEHLKYITEHKEEFGKLLSYIENFAKSYVDVDKNLEKIQLAVEKIDSFSVKEISNSFIHLLTLTALGAPADFNFLGEKIPRKRYTSTKECLNATLIHQSITGLYETQTDLSKLGED

SEQ ID NO: 101 - protein, 1356 aa, Streptococcus dysgalactiae
MDKKYSIGLDIGTNSVGWAVITDDYKVPSKKFKVLGNTDRHSIKKNLIGALLFDSGETAEATRLKRTARRRYTRRKNRIRYLQEIFSSEMSKVDDSFFHRLEESFLVEEDKKHERHPIFGNIVDEVAYHEKYPTIYHLRKKLADSTDKADLRLIYLALAHMIKFRGHFLIEGDLNPDNSDMDKLFIQLVQTYNQLFEENINASRVDAKAILSARLSKSRRLENLIAQLPGEKRNGLFGNLIALSLGLTPNFKSNFDLAEDAKLQLSKDTYDDDLDNLLAQIGDQYADLFLAAKNLSDAILLSDILRVNSEITKAPLSASMIKRYDEHHQDLTLLKALVRQQLPEKYKEIFFDQSKNGYAGYIDGGASQEEFYKFIKPILEKMDGTEELLAKLNREDLLRKQRTFDNGSIPHQIHLGELHAILRRQEDFYPFLKDNREKIEKILTFRIPYYVGPLARGNSRFAWMTRKSEETITPWNFEEVVDKGASAQSFIERMTNFDKNLPNEKVLPKHSLLYEYFTVYNELTKVKYVTEGMRKPEFLSGKQKEAIVDLLFKTNRKVTVKQLKEDYFKKIECFDSVEISGVEDRFNASLGTYHDLLKIIKDKDFLDNEENEDILEDIVLTLTLFEDKEMIEERLKKYANLFDDKVMKQLKRRHYTGWGRLSRKLINGIRDKQSGKTILDFLKDGFANRNFMQLINDDSLTFKEAIQKAQVSGQGHSLHEQIANLAGSPAIKKGILQSVKVVDELVKVMGHKPENIVIEMARENQTTQKGQKNSRERMKRIEEGIKELGSQILKEHPVENTQLQNEKLYLYYLQNGRDMYVDQELDINRLSDYDVDHIVPQSFIKDDSIDNKILTRSDKNRGKSDNVPSEEVVKKMKNYWRQLLNAKLITQRKFDNLTKAERGGLSELDKAGFIKRQLVETRQITKHVAQILDSRMNTKYDENDKLIREVKVITLKSKLVSDFRKDFQFYKVREINNYHHAHDAYLNAVVGTALIKKYTKLESEFVYGDYKVYDVSEQEIGKATAKRFFYSNIMNFFKTEITLANGEIRKRPLIETNEETGEIVWDKGRDFATVRKVLSMPQVNIVKKTEVQTGALTNESIYARGSFDKLISRKHRFESSKYGGFGSPTVTYSVLVVAKSKVQDGKVKKIKTGKELIGMTLLDKLVFEKNPLKFIEDKGYGNVQIDKCIKLPKYSLFEFENGTRRMLASRGDLQKANEMFLPAKLVTLLYHAHKIESSKELEHEAYILDHYNDLYQLLSYIERFASLYVDVEKNISKVKELFSNIESYSISEICSSVINLLTLTASGAPADFKFLGTTIPRKRYGSPQSILSSTLIHQSITGLYETRIDLSQLGGD

SEQ ID NO: 102 - protein, 1356 aa, Streptococcus dysgalactiae
MDKKYSIGLDIGTNSVGWAVITDDYKVPSKKFKVLGNTDRHSIKKNLIGALLFDSGETAEATRLKRTARRRYTRRKNRIRYLQEIFSSEMSKVDDSFFHRLEESFLVEEDKKHERHPIFGNIVDEVAYHEKYPTIYHLRKKLADSTDKADLRLIYLALAHMIKFRGHFLIEGDLNPDNSDVDKLFIQLVQTYNQLFEEKINASGVDAKAILSARLSKSKRLENLIAQLPGEKKNGLFGNLIALSLGLTPNFKSNFDLAEDAKLQLSKDTYDDDLDNLLAQIGNQYADLFLAAKNLSDAILLSDILRVNSEITKAPLSASMIKRYDEHHQDLTLLKALVRQQLPEKYKEIFFDQSKNGYAGYIDGGASQEEFYKFIKPILEKMDGTEELLAKLNREDLLRKQRTFDNGSIPHQIHLGELHAILRRQEDFYPFLKDNREKIEKILTFRIPYYVGPLARGNSRFAWMTRKSEETITPWNFEEVVDKGASAQSFIERMTNFDKNLPNEKVLPKHSLLYEYFTVYNELTKVKYVTEGMRKPEFLSGKQKEAIVDLLFKTNRKVTVKQLKEDYFKKIECFDSVEISGVEDRFNASLGTYHDLLKIIKDKDFLDNEENEDILEDIVLTLTLFEDKEMIEERLKKYANLFDDKVMKQLKRRHYTGWGRLSRKLINGIRDKQSGKTILDFLKDGFANRNFMQLINDDSLTFKEAIQKAQVSGQGHSLHEQIANLAGSPAIKKGILQSVKVVDELVKVMGHKPENIVIEMARENQTTQKGQKNSRERMKRIEEGIKELGSQILKEHPVENTQLQNEKLYLYYLQNGRDMYVDQELDINRLSDYDVDHIVPQSFIKDDSIDNKVLTRSDKNRGKSDNVPSEEVVKKMKNYWRQLLNAKLITQRKFDNLTKAERGGLSELDKAGFIKRQLVETRQITKHVAQILDSRMNTKYDENDKLIREVKVITLKSKLVSDFRKDFQFYKVREINNYHHAHDAYLNAVVGTALIKKYPKLESEFVYGDYKVYDVSEQEIGKATAKRFFYSNIMNFFKTEITLANGEIRKRPLIETNEETGEIVWDKGRDFATVRKVLSMPQVNIVKKTEVQTGALTNESIYARGSFDKLISRKHRFESSKYGGFGSPTVTYSVLVVAKSKVQDGKVKKIKTGKELIGITLLDKLVFEKNPLKFIEDKGYGNVQIDKCIKLPKYSLFEFENGTRRMLASRGDLQKANEMFLPAKLVTLLYHAHKIESSKELEHEAYILDHYNDLYQLLSYIERFASLYVDVEKNISKVKELFSNIESYSISEICSSVINLLTLTASGAPADFKFLGTTIPRKRYGSPQSILSSTLIHQSITGLYETRIDLSQLGGD

SEQ ID NO: 103 - protein, 1356 aa, Streptococcus dysgalactiae
MDKKYSIGLDIGTNSVGWAVITDDYKVPSKKFKVLGNTDRHSIKKNLIGALLFDSGETAEATRLKRTARRRYTRRKNRIRYLQEIFSSEMSKVDDSFFHRLEESFLVEEDKKHERHPIFGNIVDEVAYHEKYPTIYHLRKKLADSTDKADLRLIYLALAHMIKFRGHFLIEGDLNPDNSDMDKLFIQLVQTYNQLFEENINASRVDAKAILSARLSKSRRLENLIAQLPGEKRNGLFGNLIALSLGLTPNFKSNFDLAEDAKLQLSKDTYDDDLDNLLAQIGDQYADLFLAAKNLSDAILLSDILRVNSEITKAPLSASMIKRYDEHHQDLTLLKALVRQQLPEKYKEIFFDQSKNGYAGYIDGGASQEEFYKFIKPILEKMDGTEELLAKLNREDLLRKQRTFDNGSIPHQIHLGELHAILRRQEDFYPFLKDNREKIEKILTFRIPYYVGPLARGNSRFAWMTRKSEETITPWNFEEVVDKGASAQSFIERMTNFDKNLPNEKVLPKHSLLYEYFTVYNELTKVKYVTEGMRKPEFLSGKQKEAIVDLLFKTNRKVTVKQLKEDYFKKIECFDSVEISGVEDRFNASLGTYHDLLKIIKDKDFLDNEENEDILEDIVLTLTLFEDKEMIEERLKTYAHLFDDKVMKQLKRRHYTGWGRLSRKLINGIRDKQSGKTILDFLKDGFANRNFIQLIHDDSLTFKEAIQKAQVSGQGHSLHEQIANLAGSPAIKKGILQSVKVVDELVKVMGHKPENIVIEMARENQTTQKGQKNSRERMKRIEEGIKELGSQILKEHPVENTQLQNEKLYLYYLQNGRDMYVDQELDINRLSDYDVDHIVPQSFIKDDSIDNKVLTRSDKNRGKSDDVPSEEVVKKMKNYWRQLLNAKLITQRKFDNLTKAERGGLSELDKAGFIKRQLVETRQITKHVAQILDSRMNTKYDENDKLIREVKVITLKSKLVSDFRKDFQFYKVREINNYHHAHDAYLNAVVGTALIKKYPKLESEFVYGDYKVYDVSEQEIGKATAKRFFYSNIMNFFKTEITLANGEIRKRPLIETNEETGEIVWNKGRDFATVRKVLSMPQVNIVKKTEVQTGALTNESIYARGSFDKLISRKHRFESSKYGGFGSPTVTYSVLVVAKSKVQDGKVKKIKTGKELIGITLLDKLVFEKNPLKFIEDKGYGNVQIDKCIKLPKYSLFEFENGTRRMLASRGDLQKANEMFLPAKLVTLLYHAHKIESSKELEHEAYILDHYNDLYQLLSYIERFASLYVDVEKNISKVKELFSNIESYSISEICSSVINLLTLTASGAPADFKFLGTTIPRKRYGSPQSILSSTLIHQSITGLYETRIDLSQLGGD

SEQ ID NO: 104 - protein, 1356 aa, Streptococcus dysgalactiae
MDKKYSIGLDIGTNSVGWAVITDDYKVPSKKFKVLGNTDRHSIKKNLIGALLFDSGETAEATRLKRTARRRYTRRKNRIRYLQEIFSSEMSKVDDSFFHRLEESFLVEEDKKHERHPIFGNIVDEVAYHEKYPTIYHLRKKLADSTDKADLRLIYLALAHMIKFRGHFLIEGDLNPDNSDMDKLFIQLVQTYNQLFEENINASRVDAKAILSARLSKSRRLENLIAQLPGEKRNGLFGNLIALSLGLTPNFKSNFDLAEDAKLQLSKDTYDDDLDNLLAQIGDQYADLFLAAKNLSDAILLSDILRVNSEITKAPLSASMIKRYDEHHQDLTLLKALVRQQLPEKYKEIFFDQSKNGYAGYIDGGASQEEFYKFIKPILEKMDGTEELLAKLNREDLLRKQRTFDNGSIPHQIHLGELHAILRRQEDFYPFLKDNREKIEKILTFRIPYYVGPLARGNSRFAWMTRKSEETITPWNFEEVVDKGASAQSFIERMTNFDKNLPNEKVLPKHSLLYEYFTVYNELTKVKYVTEGMRKPEFLSGKQKEAIVDLLFKTNRKVTVKQLKEDYFKKIECFDSVEISGVEDRFNASLGTYHDLLKIIKDKDFLDNEENEDILEDIVLTLTLFEDKEMIEERLKKYANLFDDKVMKQLKRRHYTGWGRLSRKLINGIRDKQSGKTILDFLKDGFANRNFMQLINDDSLTFKEAIQKAQVSGQGHSLHEQIANLAGSPAIKKGILQSVKVVDELVKVMGHKPENIVIEMARENQTTQKGQKNSRERMKRIEEGIKELGSQILKEHPVENTQLQNEKLYLYYLQNGRDMYVDQELDINRLSDYDVDHIVPQSFIKDDSIDNKVLTRSDKNRGKSDNVPSEEVVKKMKNYWRQLLNAKLITQRKFDNLTKAERGGLSELDKAGFIKRQLVETRQITKHVAQILDSRMNTKYDENDKLIREVKVITLKSKLVSDFRKDFQFYKVREINNYHHAHDAYLNAVVGTALIKKYPKLESEFVYGDYKVYDVSEQEIGKATAKRFFYSNIMNFFKTEITLANGEIRKRPLIETNEETGEIVWDKGRDFATVRKVLSMPQVNIVKKTEVQTGALTNESIYARGSFDKLISRKHRFESSKYGGFGSPTVTYSVLVVAKSKVQDGKVKKIKTGKELIGITLLDKLVFEKNPLKFIEDKGYGNVQIDKCIKLPKYSLFEFENGTRRMLASRGDLQKANEMFLPAKLVTLLYHAHKIESSKELEHEAYILDHYNDLYQLLSYIERFASLYVDVEKNISKVKELFSNIESYSISEICSSVINLLTLTASGAPADFKFLGTTIPRKRYGSPQSILSSTLIHQSITGLYETRIDLSQLGGD

SEQ ID NO: 105 - protein, 1356 aa, Streptococcus dysgalactiae
MDKKYSIGLDIGTNSVGWAVITDDYKVPSKKFKVLGNTDRHSIKKNLIGALLFDSGETAEATRLKRTARRRYTRRKNRIRYLQEIFSSEMSKVDDSFFHRLEESFLVEEDKKHERHPIFGNIVDEVAYHEKYPTIYHLRKKLADSTDKADLRLIYLALAHMIKFRGHFLIEGDLNPDNSDMDKLFIQLVQTYNQLFEENINASRVDAKAILSARLSKSRRLENLIAQLPGEKRNGLFGNLIALSLGLTPNFKSNFDLAEDAKLQLSKDTYDDDLDNLLAQIGDQYADLFLAAKNLSDAILLSDILRVNSEITKAPLSASMIKRYDEHHQDLTLLKALVRQQLPEKYKEIFFDQSKNGYAGYIDGGASQEEFYKFIKPILEKMDGTEELLAKLNREDLLRKQRTFDNGSIPHQIHLGELHAILRRQEDFYPFLKDNREKIEKILTFRIPYYVGPLARGNSRFAWMTRKSEETITPWNFEEVVDKGASAQSFIERMTNFDKNLPNEKVLPKHSLLYEYFTVYNELTKVKYVTEGMRKPEFLSGKQKEAIVDLLFKTNRKVTVKQLKEDYFKKIECFDSVEISGVEDRFNASLGTYHDLLKIIKDKDFLDNEENEDILEDIVLTLTLFEDKEMIEERLKTYAHLFDDKVMKQLKRRHYTGWGRLSRKLINGIRDKQSGKTILDFLKDGFANRNFIQLIHDDSLTFKEAIQKAQVSGQGHSLHEQIANLAGSPAIKKGILQSVKVVDELVKVMGHKPENIVIEMARENQTTQKGQKNSRERMKRIEEGIKELGSQILKEHPVENTQLQNEKLYLYYLQNGRDMYVDQELDINRLSDYDVDHIVPQSFIKDDSIDNKVLTRSDKNRGKSDDVPSEEVVKKMKNYWRQLLNAKLITQRKFDNLTKAERGGLSELDKAGFIKRQLVETRQITKHVAQILDSRMNTKYDENDKLIREVKVITLKSKLVSDFRKDFQFYKVREINNYHHAHDAYLNAVVGTALIKKYPKLESEFVYGDYKVYDVSEQEIGKATAKRFFYSNIMNFFKTEITLANGEIRKRPLIETNEETGEIVWDKGRDFATVRKVLSMPQVNIVKKTEVQTGALTNESIYARGSFDKLISRKHRFESSKYGGFGSPTVTYSVLVVAKCKVQDGKVKKIKTGKELIGITLLDKLVFEKNPLKFIEDKGYGNVQIDKCIKLPKYSLFEFENGTRRMLASRGDLQKANEMFLPAKLVTLLYHAHKIESSKELEHEAYILDHYNDLYQLLSYIERFASLYVDVEKNISKVKELFSNIESYSISEICSSVINLLTLTASGAPADFKFLGTTIPRKRYGSPQSILSSTLIHQSITGLYETRIDLSQLGGD

SEQ ID NO: 106 - protein, 1356 aa, Streptococcus dysgalactiae
MDKKYSIGLDIGTNSVGWAVITDDYKVPSKKFKVLGNTDRHSIKKNLIGALLFDSGETAEATRLKRTARRRYTRRKNRIRYLQEIFSSEMSKVDDSFFHRLEESFLVEEDKKHERHPIFGNIVDEVAYHEKYPTIYHLRKKLADSTDKADLRLIYLALAHMIKFRGHFLIEGDLNPDNSDVDKLFIQLVQTYNQLFEENINASRVDAKAILSARLSKSRRLENLIAQLPGEKRNGLFGNLIALSLGLTPNFKSNFDLAEDAKLQLSKDTYDDDLDNLLAQIGDQYADLFLAAKNLSDAILLSDILRVNSEITKAPLSASMIKRYDEHHQDLTLLKALVRQQLPEKYKEIFFDQSKNGYAGYIDGGASQEEFYKFIKPILEKMDGTEELLAKLNREDLLRKQRTFDNGSIPHQIHLGELHAILRRQEDFYPFLKDNREKIEKILTFRIPYYVGPLARGNSRFAWMTRKSEETITPWNFEEVVDKGASAQSFIERMTNFDKNLPNEKVLPKHSLLYEYFTVYNELTKVKYVTEGMRKPAFLSGEQKKAIVDLLFKTNRKVTVKQLKEDYFKKIECFDSVEISGVEDRFNASLGTYHDLLKIIKDKDFLDNEENEDILEDIVLTLTLFEDKEMIEERLKTYAHLFDDKVMKQLKRRHYTGWGRLSRKLINGIRDKQSGKTILDFLKDGFANRNFIQLIHDDSLTFKEAIQKAQVSGQGHSLHEQIANLAGSPAIKKGILQSVKVVDELVKVMGHKPENIVIEMARENQTTQKGQKNSRERMKRIEEGIKELGSQILKEHPVENTQLQNEKLYLYYLQNGRDMYVDQELDINRLSDYDVDHIVPQSFIKDDSIDNKVLTRSDKNRGKSDNVPSEEVVKKMKNYWRQLLNAKLITQRKFDNLTKAERGGLSELDKAGFIKRQLVETRQITKHVAQILDSRMNTKYDENDKLIREVKVITLKSKLVSDFRKDFQFYKVREINNYHHAHDAYLNAVVGTALIKKYPKLESEFVYGDYKVYDVSEQEIGKATAKRFFYSNIMNFFKTEITLANGEIRKRPLIETNEETGEIVWDKGRDFATVRKVLSMPQVNIVKKTEVQTGALTNESIYARGSFDKLISRKHRFESSKYGGFGSPTVTYSVLVVAKSKVQDGKVKKIKTGKELIGITLLDKLVFEKNPLKFIEDKGYGNVQIDKCIKLPKYSLFEFENGTRRMLASRGDLQKANEMFLPAKLVTLLYHAHKIESSKELEHEAYILDHYNDLYQLLSYIERFASLYVDVEKNISKVKELFSNIESYSISEICSSVINLLTLTASGAPADFKFLGTTIPRKRYGSPQSILSSTLIHQSITGLYETRIDLSQLGGD

SEQ ID NO: 107 - protein, 1345 aa, Streptococcus equi
MKKPYTIALDIGTNSVGWVVVTDDYRVPTKKMKVLGNTERKTIKKNLIGALLFDSGDTAEGTRLKRTARRRYTRRKNRLRYLKEIFTEEMAKVDDGFFQRLEDSFYVLEDKEGNKHPIFANLADEVAYHKKYPTIYHLRKELVDNPQKADLRLIYLAVAHIIKFRGHFLIEGTLSSKNNNLQKSFDHLVDTYNLLFEEQLLTEGINAKELLSAALSKSKRLENLISLIPGQKKTGIFGNIIALSLGLTPNFKANFGLSKDVKLQLAKDTYADDLDSLLAQIGDQYADLFLAAKNLSDAILLSDILTESDEITRAPLSASMVKRYREHHKDLVTLKTLIKDQLPEKYQEIFLDKTKNGYAGYIEGQVSQEEFYKYLKPILARLDGSEPLLLKIDREDFLRKQRTFDNGSIPHQIHLEELHAILRRQEVFYPFLKDNRKKIESLLTFRIPYYVGPLARGHSRFAWVKRKFDGAIRPWNFEEIVDEEASAQIFIEKMTKNDLYLPNEKVLPKHSLLYETFTVYNELTKVKYATEGMTRPQFLSADQKQAIVDLLFKTNRKVTVKQLKENYFKKIECWDSVEITGVEDSFNASLGTYHDLLKIIQDKDFLDNPDNQKIIEDIILTLTLFEDKKMISKRLDQYAHLFDKVVLNKLERHHYTGWGRLSGKLINGIRDKQSGKTILDFLKDGFANRNFMQLIHDSELSFIDEIAKAQVIGKTEYSKDLVGNLAGSPAIKKGISQTIKIVDELVKIMGYLPQQIVIEMARENQTTAQGIKNARQRMRKLEETAKKLGSNILKEHPVDNSQLQNDKRYLYYLQNGKDMYTGDDLDIDYLSSYDIDHIIPQSFIKNNSIDNKVLTSQGANRGKLDNVPSEAIVRKMKGYWQSLLRAGAISKQKFDNLTKAERGGLTQVDKAGFIQRQLVETRQITKHVAQILDSRFNTEFDDHNKRIRKVHIITLKSKLVSDFRKEFGLYKIRDINHYHHAHDAYLNAVVAKAILGKYPQLAPEFVYGDYPKYNSFKERQKATQKMLFYSNILKFFKDQESLHVNSDGEEIWNANKHLPIIKNVLSIPQVNIVKKTEVQTGGFYKESILSKGNSDKLIPRKNNWDTRKYGGFDSPTVAYSVLVIAKMEKGKAKVLKPVKEMVGITIMERTAFEENPVVFLEARGYREIQEHLIIKLPKYSLFELENGRRRLLASSELQKGNELFLPVDYMTFLYLAAHYHELTGSSEDVLRKKYFVDRHLHYFDDIIQMINDFAERHILASSNLEKINHTYHNNSDLPVNERAENIINVFTFVALGAPAAFKFFDATIDRKRYTSTKEVLNATLIHQSVTGLYETRIDLSQLGEN

SEQ ID NO: 108 - protein, 1345 aa, Streptococcus equi
MKKPYTIALDIGTNSVGWVVVTDDYRVPTKKMKVLGNTERKTIKKNLIGALLFDSGDTAEGTRLKRTARRRYTRRKNRLRYLKEIFTEEMAKVDDGFFQRLEDSFYVLEDKEGNKHPIFANLADEVAYHKKYPTIYHLRKELVDNPQKADLRLIYLAVAHIIKFRGHFLIEGTLSSKNNNLQKSFDHLVDTYNLLFEEQLLTEGINAKELLSAALSKSKRLENLISLIPGQKKTGIFGNIIALSLGLTPNFKANFGLSKDVKLQLAKDTYADDLDSLLAQIGDQYADLFLAAKNLSDAILLSDILTESDEITRAPLSASMVKRYREHHKDLVTLKTLIKDQLPEKYQEIFLDKTKNGYAGYIEGQVSQEEFYKYLKPILARLDGSEPLLLKIDREDFLRKQRTFDNGSIPHQIHLEELHAILRRQEVFYPFLKDNRKKIESLLTFRIPYYVGPLARGHSRFAWVKRKFDGAIRPWNFEEIVDEEASAQIFIEKMTKNDLYLPNEKVLPKHSLLYETFTVYNELTKVKYATEGMTRPQFLSADQKQAIVDLLFKTNRKVTVKQLKENYFKKIECWDSVEITGVEDSFNASLGTYHDLLKIIQDKDFLDNPDNQKIIEDIILTLTLFEDKKMISKRLDQYAHLFDKVVLNKLERHHYTGWGRLSGKLINGIRDKQSGKTILDFLKDGFANRNFMQLIHDSELSFIDEIAKAQVIGKTEYSKDLVGNLASSPAIKKGISQTIKIVDELVKIMGYLPQQIVIEMARENQTTAQGIKNARQRMRKLEETAKKLGSNILKEHPVDNSQLQNDKRYLYYLQNGKDMYTGDDLDIDYLSSYDIDHIIPQSFIKNNSIDNKVLTSQGANRGKLDNVPSEAIVRKMKGYWQSLLRAGAISKQKFDNLTKAERGGLTQVDKAGFIQRQLVETRQITKHVAQILDSRFNTEFDDHNKRIRKVHIITLKSKLVSDFRKEFGLYKIRDINHYHHAHDAYLNAVVAKAILGKYPQLAPEFVYGDYPKYNSFKERQKATQKTLFYSNILKFFKDQESLHVNSDGEEIWNANKHLPIIKNVLSIPQVNIVKKTEVQTGGFYKESILSKGNSDKLIPRKNNWDTRKYGGFDSPTVAYSVLVIAKMEKGKAKVLKPVKEMVGITIMERIAFEENPVVFLEAKGYREIQEHLIIKLPKYSLFELENGRRRLLASSELQKGNELFLPVDYMTFLYLAAHYHELTGSSEDVLRKKYFVERHLHYFDDIIQMINDFAERHILASSNLEKINHTYHNNSDLPINERAENIINVFTFVALGAPAAFKFFDATIDRKRYTSTKEVLNATLIHQSVTGLYETRIDLSQLGEN

SEQ ID NO: 109 - protein, 1345 aa, Streptococcus equi
MKKPYTIALDIGTNSVGWVVVTDDYRVPTKKMKVLGNTERKTIKKNLIGALLFDSGDTAEGTRLKRTARPRYTRRKNRLRFLKEIFTEEMAKVDDGFFQRLEDSFYVLEDKEGNKHPIFANLADEVAYHKKYPTIYHLRKELVDNPQKADLRLIYLAVAHIIKFRGHFLIEGTLSSKNNNLQKSFDHLVDTYNLLFEEQLLTEGINAKELLSAALSKSKRLENLISLIPGQKKTGIFGNIIALSLGLTPNFKANFGLSKDVKLQLAKDTYADDLDSLLAQIGDQYADLFLAAKNLSDAILLSDILTESDEITRAPLSASMVKRYREHHKDLVTLKTLIKDQLPEKYQEIFLDKTKNGYAGYIEGQVSQEEFYKYLKPILARLDGSEPLLLKIDREDFLRKQRTFDNGSIPHQIHLEELHAILRRQEVFYPFLKDNRKKIESLLTFRIPYYVGPLARGHSRFAWVKRKFDGAIRPWNFEEIVDEEASAQIFIEKMTKNDLYLPNEKVLPKHSLLYETFTVYNELTKVKYATEGMTRPQFLSADQKQAIVDLLFKTNRKVTVKQLKENYFKKIECWDSVEITGVEDSFNASLGTYHDLLKIIQDKDFLDNPDNQKIIEDIILTLTLFEDKKMISKRLDQYAHLFDKVVLNKLERHHYTGWGRLSGKLINGIRDKQSGKTILDFLKDGFANRNFMQLIHDSELSFIDEIAKAQVIGKTEYSKDLVGNLAGSPAIKKGISQTIKIVDELVKIMGYLPQQIVIEMARENQTTAQGIKNARQRMRKLEETAKKLGSNILKEHPVDNSQLQNDKRYLYYLQNGKDMYTGDDLDIDYLSSYDIDHIIPQSFIKNNSIDNKVLTSQGANRGKLDNVPSEAIVRKMKGYWQSLLRAGAISKQKFDNLTKAERGGLTQVDKAGFIQLQLVETRQITKHVAQILDSRFNTEFDDHNKRIRKVHIITLKSKLVSDFRKEFGLYKIRDINHYHHAHDAYLNAVVAKAILGKYPQLAPEFVYGDYPKYNSFKERQKATQKTLFYSNILKFFKDQESLHVNSDGEEIWNANKHLPIIKNVLSIPQVNIVKKTEVQTGGFYKESILSKGNSDKLIPRKNNWDTRKYGGFDSPTVAYSVLVIAKMEKGKAKVLKPVKEMVGITIMERIAFEENPVVFLEAKGYREIQEHLIIKLPKYSLFELENGRRRLLASSELQKGNELFLPVDYMTFLYLAAHYHELTGSSEDVLRKKYFVERHLHYFDDIIQMINDFAERHILASSNLEKINHTYHNNSDLPVNERAENIINVFTFVALGAPAAFKFFDATIDRKRYTSTKEVLNATLIHQSVTGLYETRIDLSQLGEN

SEQ ID NO: 110 - protein, 1360 aa, Streptococcus equinus
MEKTYSIGLDIGTNSVGWAVITDDYKVPAKKMKVLGNTDKKYIKKNLLGALLFDSGETAEATRLKRAARRRYTRRKNRLRYLQEIFAKEMAKVDESFFQRLEESFLTDDDKTFDSHPIFGNKAEEDTYHQEFPTIYHLRKHLADSPEKVDLRLVYLALAHMIKFRGHFLIEGQLNAENTDVQKIFADFVGVYDRTFDDSHLSEITVDAASILTEKISKSRRLENLIKQYPTEKKNTLFGNLVALALGLQPNFKTNFKLSEDAKLQFSKDTYDEDLEELLGKIGDDYADLFTAAKNLYDAILLSGILTVDDNSTKAPLSASMIKRYEEHHEDLEKLKTFIKVNNFDKYHEIFKDKSKNGYAGYIENGVKQDIFYKHLKSIISEKNGGQYFLDKIEREDFLRKQRTFDNGSIPYQIHLQEMRTILRRQGEYYPFLKENQAKIEKILTFRIPYYVGPLARKNSRFAWAKYHSDEPITPWNFDEVVDKEKSAEKFITRMTLNDLYLPEEKVLPKHSYVYETFAVYNELTKIKYVNEQGKSFFFDANMKQEIFDHVFKENRKVTKAKLLSYLNNEFEEFRINDLIGLDKDSKSFNASLGTYHDLKKILDKSFLDDKTNEQIIEDIVLTLTLFEDRDMIHERLQKYSDIFTSQQLKKLERRHYTGWGRLSYKLINGIRNKENNKTILDFLIDDGDANRNFMQLINDDSLSFKTTIQEAQVVGDVDDIEAVVHDLPGSPAIKKGILQSVKIVDELVKVMGHNPQNIVIEMARENQITGYGRNRSNQRLKRLQDSLKPSYVDSKVENSHLQNDRLFLYYIQNGKDMYTGEELDIDHLSDYDIDHIIPQAFIKDNSIDNRVLTSSAKNRGKSDDVPSIEIVRNRKSYWYKLYKSGLISKRKFDNLTKAERGGLTETDKAGFIKRQLVETRQITKHVAQILDARFNTKCDENDKVIRDVKVITLKSSLVSQFRKEFKFYKVREINDYHHAHDAYLNAVVGTALLKKYPKLAPEFVYGEYKKYDVSSDNHSELGKATAKYFFYSNLMNFFKTEVKYADGRVFERPDIETNADGEVVWNKQRDFNIVRKVLSYPQVNIVKKVEVQTGGFSKESILPKGDSDKLIPRKTKKLQWETQKYGGFDSPTVAYSVLVVADVEKGKTRKLKTVKELVGISIMERSSFEENPVSFLEKKGYHNVQEDKLIKLPKYSLFEFEGGRRRLLASATELQKGNEVVLPQYMVNLLYHSQHVNNSHKPEHLNYVKQHKDEFKDIFNLIISIARINILKPKVVDNLINEFTEYGQEDISSLSESFINLLKFISFGAPGAFKFLKLDVKQSNLRYKSTTEALSATLIHQSVTGLYETRIDLSKLGEE

SEQ ID NO: 111 - protein, 1353 aa, Streptococcus gallolyticus
MTKKNYSIGLDIGTNSVGWAVITDDYKVPAKKMKVLGNTDKKYIKKNLLGALLFDSGETAEATRLKRTARRRYTRRKNRLRYLQEIFAEEMTKVDESFFYRLDESFLTTDEKDFERHPIFGNKAEEDAYHQKFPTIYHLRNYLADSSEKADLRLVYLALAHMIKYRGHFLIEGKLNAENTDVQKLFTDFVGVYDRTFDDSHLSEITVDVASTLTEKISKSRRLENLIKYYPTEKKNTLFGNLIALALGLQPNFKMNFKLSEDAKLQFSKDTYEEDLEELLGKIGDDYADLFTSAKNLYDAILLSGILTVDDNSTKAPLSASMIKRYVEHHEDLEKLKEFIKANKSELYHDIFKDKNKNGYAGYIENGVKQDEFYKYLKNTLSKIDGSDYFLDKIEREDFLRKQRTFDNGSIPHQIHLQEMHAILRRQGDYYPFLKEKQDRIEKILTFRIPYYVGPLVRKDSRFAWAEYRSDEKITPWNFDKVIDKEKSAEKFITRMTLNDLYLPEEKVLPKHSHVYETYAVYNELTKIKYVNEQGKESFFDSNMKQEIFDHVFKENRKVTKEKLLNYLNKEFPEYRIKDLIGLDKENKSFNASLGTYHDLKKILDKAFLDDKVNEEVIEDIIKTLTLFEDKDMIHERLQKYSDIFTANQLKKLERRHYTGWGRLSYKLINGIRNKENNKTILDYLIDDGSANRNFMQLINDDTLPFKQIIQKSQVVGDVDDIEAVVHDLPGSPAIKKGILQSVKIVDELVKVMGDNPDNIVIEMARENQTTNRGRSQSQQRLKKLQSSLKPSYIEDKVENSHLQNDQLFLYYIQNGKDMYTGDELDIDHLSDYDIDHIIPQAFIKDDSIDNRVLTSSAKNRGKSDDVPSLDIVRARKAEWVRLYKSGLISKRKFDNLTKAERGGLTEADKAGFIKRQLVETRQITKHVAQILDARFNTEHDENDKVIRDVKVITLKSNLVSQFRKDFEFYKVREINDYHHAHDAYLNAVVGTALLKKYPKLASEFVYGEYKKYDISSDKATAKYFFYSNLMNFFKTKVKYADGTVFERPIIETNADGEIAWNKQIDFEKVRKVLSYPQVNIVKKVETQTGGFSKESILPKGDSDKLIPRKTKKVYWDTKKYGGFDSPTVAYSVFVVADVEKGKAKKLKTVKELVGISIMERSFFEENPVEFLENKGYHNIREDKLIKLPKYSLFEFEGGRRRLLASASELQKGNEMVLPGYLVELLYHAHRADNFNSTEYLNYVSEHKKEFEKVLSCVEDFANLYVDVEKNLSKIRAVADSMDNFSIEEISNSFINLLTLTALGAPADFNFLGEKIPRKRYTSTKECLTATLIHQSITGLYETRIDLSKLGEE

SEQ ID NO: 112 - protein, 1354 aa, Streptococcus gallolyticus
MTEKNYSIGLDIGTNSVGWAVITDDYKVPAKKMKVLGNTDKKYIKKNLLGALLFDNGETAEATRLKRTARRRYTRRKNRLRYLQEIFAEEMAKVDESFFYRLDESFLTTDDKDFERHPIFGNKADEIKYHQEFPTIYHLRKHLADSHEKADLRLIYLALAHMIKFRGHFLIEGELNAENTDVQKLFEAFVEVYDRTFDDSNLSEITVDASSILTEKFSKSRRLENLIKHYPTEKKNTLFGNLVALALGLQPNFKTSFKLSEDAKLQFSKDTYEEDLEELIGKIGDEYADLFTSAKNLYDAILLSGILTVADNTTKAPLSASMIKRYNEHQVDLKKLKEFIKNNASDKYDEIFNDKDKNGYAGYIENGVKQDEFYKYLKTTLSKIDGSDYFLDKIEREDFLRKQRTFDNGSIPHQIHLQEMHAILRRQGEHYAFLKENQAKIEKILTFRIPYYVGPLARKNSRFAWAEYHSDEKITPWNFDEIIDKEKSAEKFITRMTLNDLYLPEEKVLPKHSLVYETYTVYNELTKVKYVNEQGKSNFFDANMKQEIFEHVFKENRKVTKDKFLNYLNKEFPEYRIQDLIGLDKENKSFNASLGTYHDLKKILDKSFLDDKTNETIIEDIIQTLTLFEDRDMIRQRLQKYSDIFTPQQLKKLERRHYTGWGRLSYKLINGIRNKENGKSILDYLIDDGYANRNFMQLISDDTLPFKQIIKDAQIIGDIDDVTSVVRELPGSPAIKKGILQSVKIVDELVKVMGHNPDNIVIEMARENQTTNRGRNQSQQRLKKLQDSLKPSYIEGKVENNHLQDDRLFLYYIQNGKDMYTGDELDIDHLSDYDIDHIIPQAFIKDDSIDNRVLTSSAKNRGKSDDVPSLDIVHDRKADWIRLYKSGLISKRKFDNLTKAERGGLTENDKAGFIKRQLVETRQITKHVAQILDSRFNTERDENDKVIRNVKVITLKSNLVSQFRKDFKFYKVREINDYHHAHDAYLNAVVGTALLKKYPKLAPEFVYGEYKKYDISGDKATAKYFFYSNLMNFFKRVIRYSNGKVVVRPVIECSKDTGEIAWNKQTDFEKVRRVLSYPQVNIVKKVETQTGGFSKESILPKGNSDKLIPRKTKKFRWDTPKYGGFDSPNIAYSVFVIADVEKGKAKKLKTVKELVGISIMERSSFEENPVVFLEKKGYQNVQEDNLIKLPKYSLFEFEGGRRRLLASASELQKGNEVVLSRHLVELLYHAHRVNSFNNSEHLKYVSEHKKEFGEVLSCVENFAKSYVDVEKNLGKIRAVADKIDTFSIEDISISFVNLLTLTALGAPADFNFLGEKIPRKRYTSTKECLNATLIHQSITGLYETRIDLSKLGEE

SEQ ID NO: 113 - protein, 1355 aa, Streptococcus gallolyticus; identical to SEQ ID NO: 12

SEQ ID NO: 114 - protein, 1358 aa, Streptococcus infantarius
MEKSYSIGLDIGTNSVGWAVITDDYKVPAKKMKVLGNTDKKYIKKNLLGALLFDSGETAEVTRLKRTARRRYTRRKNRLRYLQEIFAKEMTKVDESFFQRLEESFLTDDDKTFDSHPIFGNKAEEDAYHQKFPTIYHLRKYLADSQEKADLRLVYLALAHMIKYRGHFLIEGELNAENTDVQKLFNVFVETYDKIVDESHLSEIEVDASSILTEKVSKSRRLENLIKQYPTEKKNTLFGNLIALALGLQPNFKTNFKLSEDAKLQFSKDTYEEDLEELLGKVGDDYADLFISAKNLYDAILLSGILTVDDNSTKAPLSASMIKRYVEHHEDLEKLKEFIKINKLKLYHDIFKDKTKNGYAGYIDNGVKQDEFYKYLKTILTKIDDSDYFLDKIERDDFLRKQRTFDNGSIPHQIHLQEMHSILRRQGDYYPFLKENQAKIEKILTFRIPYYVGPLARKDSRFAWANYHSDEPITPWNFDEVVDKEKSAEKFITRMTLNDLYLPEEKVLPKHSHVYETFTVYNELTKIKYVNEQGESFFFDANMKQEIFDHVFKENRKVTKAKLLSYLNNEFEEFRINDLIGLDKDSKSFNASLGTYHDLKKILDKSFLDDKTNGQIIEDIVLTLTLFEDRDMIHERLQKYSDFFTSQQLKKLERRHYTGWGRLSYKLINGIRNKENNKTILDFLIDDGHANRNFMQLINDESLSFKTIIQEAQVVGDVDDIEAVVHDLPGSPAIKKGILQSVKIVDELVKVMGDNPDNIVIEMARENQTTGYGRNKSNQRLKRLQDSLKPSYVDSKVENSHLQNDRLFLYYIQNGKDMYTGEELDIDRLSDYDIDHIIPQAFIKDNSIDNKVLTSSAKNRGKSDDVPSIEIVRNRRSYWYKLYKSGLISKRKFDNLTKAERGGLTEADKAGFIKRQLVETRQITKHVAQILDARFNTKRDENDKVIRDVKVITLKSNLVSQFRKEFKFYKVREINDYHHAHDAYLNAVVGTALLKKYPKLTPEFVYGEYKKYDVSSDDYSEMGKATAKYFFYSNLMNFFKTEVKYADGRVFERPDIETNADGEVVWNKQKDFDIVRKVLSYPQVNIVKKVEAQTGGFSKESILSKGDSDKLIPRKTKKVYWNTKKYGGFDSPTVAYSVLVVADIEKGKAKKLKTVKELVGISIMERSFFEENPVSFLEKKGYHNVQEDKLIKLPKYSLFEFEGGRRRLLASATELQKGNEVMLPAHLVELLYHAHRIDSFNSTEHLKYVSEHKKEFEKVLSCVENFSNLYVDVEKNLSKVRAAAESMTNFSLEEISASFINLLTLTALGAPADFNFLGEKIPRKRYTSTKECLSATLIHQSVTGLYETRIDLSKLGEE

SEQ ID NO: 115 - protein, 1358 aa, Streptococcus iniae
MRKPYSIGLDIGTNSVGWAVITDDYKVPSKKMRIQGTTDRTSIKKNLIGALLFDNGETAEATRLKRTTRRRYTRRKYRIKELQKIFSSEMNELDIAFFPRLSESFLVSDDKEFENHPIFGNLKDEITYHNDYPTIYHLRQTLADSDQKADLRLIYLALAHIIKFRGHFLIEGNLDSENTDVHVLFLNLVNIYNNLFEEDVETASIDAEKILTSKTSKSRRLENLIAEIPNQKRNMLFGNLVSLALGLTPNFKTNFELLEDAKLQISKDSYEEDLDNLLAQIGDQYADLFIAAKKLSDAILLSDIITVKGASTKAPLSASMVQRYEEHQQDLALLKNLVKKQIPEKYKEIFDNKEKNGYAGYIDGKTSQEEFYKYIKPILLKLDGTEKLISKLEREDFLRKQRTFDNGSIPHQIHLNELKAIIRRQEKFYPFLKENQKKIEKLFTFKIPYYVGPLANGQSSFAWLKRQSNESITPWNFEEVVDQEASARAFIERMTNFDTYLPEEKVLPKHSPLYEMFMVYNELTKVKYQTEGMKRPVFLSSEDKEEIVNLLFKKERKVTVKQLKEEYFSKMKCFHTVTILGVEDRFNASLGTYHDLLKIFKDKAFLDDEANQDILEEIVWTLTLFEDQAMIERRLVKYADVFEKSVLKKLKKRHYTGWGRLSQKLINGIKDKQTGKTILGFLKDGVANRNFMQLINDSSLDFAKIIKNEQEKTIKNESLEETIANLAGSPAIKKGILQSIKIVDEIVKIMGQNPDNIVIEMARENQSTMQGIKNSRQRLRKLEEVHKNTGSKILKEYNVSNTQLQSDRLYLYLLQDGKDMYTGKELDYDNLSQYDIDHIIPQSFIKDNSIDNTVLTTQASNRGKSDNVPNIETVNKMKSFWYKQLKSGAISQRKFDHLTKAERGALSDFDKAGFIKRQLVETRQITKHVAQILDSRFNSNLTEDSKSNRNVKIITLKSKMVSDFRKDFGFYKLREVNDYHHAQDAYLNAVVGTALLKKYPKLEAEFVYGDYKHYDLPDSSLGKATTRMFFYSNLMNFFKKEIKLADDTIFTRPQIEVNTETGEIVWDKVKDMQTIRKVMSYPQVNIVMKTEVQTGGFSKESIWPKGDSDKLIARKKSWDPKKYGGFDSPIIAYSVLVVAKIAKGKTQKLKTIKELVGIKIMEQDEFEKDPIAFLEKKGYQDIQTSSIIKLPKYSLFELENGRKRLLASELQKGNELALPNKYVKFLYLASHYTKFTGKEEDREKKRSYVESHLYYFDEIMQIIVEYSNRYILADSNLIKIQNLYKEKDNFSIEEQAINMLNLFTFTDLGAPSAFKFFNGDIDRKRYSSTNEIINSTLIYQSPTGLYETRIDLSKLGGK

SEQ ID NO: 116 - protein, 1263 aa, Streptococcus iniae
  VARIANT (1257)..(1257): Xaa can be any naturally occurring amino acid
MRKPYSIGLDIGTNSVGWAVITDDYKVPSKKMRIQGTTDRTSIKKNLIGALLFDNGETAEATRLKRTTRRRYTRRKYRIKELQKIFSSEMNELDIAFFPRLSESFLVSDDKEFENHPIFGNLKDEITYHNDYPTIYHLRQTLADSDQKADLRLIYLALAHIIKFRGHFLIEGNLDSENTDVHVLFLNLVNIYNNLFEEDVETASIDAEKILTSKTSKSRRLENLIAEIPNQKRNMLFGNLVSLALGLTPNFKTNFELLEDAKLQISKDSYEEDLDNLLAQIGDQYADLFIAAKKLSDAILLSDIITVKGASTKAPLSASMVQRYEEHQQDLALLKNLVKKQIPEKYKEIFDNKEKNGYAGYIDGKTSQEEFYKYIKPILLKLDGTEKLISKLEREDFLRKQRTFDNGSIPHQIHLNELKAIIRRQEKFYPFLKENQKKIEKLFTFKIPYYVGPLANGQSSFAWLKRQSNESITPWNFEEVVDQEASARAFIERMTNFDTYLPEEKVLPKHSPLYEMFMVYNELTKVKYQTEGMKRPVFLSSEDKEEIVNLLFKKERKVTVKQLKEEYFSKMKCFHTVTILGVEDRFNASLGTYHDLLKIFKDKAFLDDEANQDILEEIVWTLTLFEDQAMIERRLVKYADVFEKSVLKKLKKRHYTGWGRLSQKLINGIKDKQTGKTILGFLKDGVANRNFMQLINDSSLDFAKIIKNEQEKTIKNESLEETIANLAGSPAIKKGILQSIKIVDEIVKIMGQNPDNIVIEMARENQSTMQGIKNSRQRLRKLEEVHKNTGSKILKEYNVSNTQLQSDRLYLYLLQDGKDMYTGKELDYDNLSQYDIDHIIPQSFIKDNSIDNTVLTTQASNRGKSDNVPNIETVNKMKSFWYKQLKSGAISQRKFDHLTKAERGALSDFDKAGFIKRQLVETRQITKHVAQILDSRFNSNLTEDSKSNRNVKIITLKSKMVSDFRKDFGFYKLREVNDYHHAQDAYLNAVVGTALLKKYPKLEAEFVYGDYKHYDLPDSSLGKATTRMFFYSNLMNFFKKEIKLADDTIFTRPQIEVNTETGEIVWDKVKDMQTIRKVMSYPQVNIVMKTEVQTGGFSKESIWPKGDSDKLIARKKSWDPKKYGGFDSPIIAYSVLVVAKIAKGKTQKLKTIKELVGIKIMEQDEFEKDPIAFLEKKGYQDIQTSSIIKLPKYSLFELENGRKRLLASELQKGNELALPNKYVKFLYLASHYTKFTGKEEDREKKRSYVESHLYYFXEVKSSF

SEQ ID NO: 117 - protein, 1257 aa, Streptococcus iniae
  VARIANT (1255)..(1255): Xaa can be any naturally occurring amino acid
  VARIANT (1257)..(1257): Xaa can be any naturally occurring amino acid
MRKPYSIGLDIGTNSVGWAVITDDYKVPSKKMRIQGTTDRTSIKKNLIGALLFDNGETAEATRLKRTTRRRYTRRKYRIKELQKIFSSEMNELDIAFFPRLSESFLVSDDKEFENHPIFGNLKDEITYHNDYPTIYHLRQTLADSDQKADLRLIYLALAHIIKFRGHFLIEGNLDSENTDVHVLFLNLVNIYNNLFEEDVETASIDAEKILTSKTSKSRRLENLIAEIPNQKRNMLFGNLVSLALGLTPNFKTNFELLEDAKLQISKDSYEEDLDNLLAQIGDQYADLFIAAKKLSDAILLSDIITVKGASTKAPLSASMVQRYEEHQQDLALLKNLVKKQIPEKYKEIFDNKEKNGYAGYIDGKTSQEEFYKYIKPILLKLDGTEKLISKLEREDFLRKQRTFDNGSIPHQIHLNELKAIIRRQEKFYPFLKENQKKIEKLFTFKIPYYVGPLANGQSSFAWLKRQSNESITPWNFEEVVDQEASARAFIERMTNFDTYLPEEKVLPKHSPLYEMFMVYNELTKVKYQTEGMKRPVFLSSEDKEEIVNLLFKKERKVTVKQLKEEYFSKMKCFHTVTILGVEDRFNASLGTYHDLLKIFKDKAFLDDEANQDILEEIVWTLTLFEDQAMIERRLVKYADVFEKSVLKKLKKRHYTGWGRLSQKLINGIKDKQTGKTILGFLKDGVANRNFMQLINDSSLDFAKIIKNEQEKTIKNESLEETIANLAGSPAIKKGILQSIKIVDEIVKIMGQNPDNIVIEMARENQSTMQGIKNSRQRLRKLEEVHKNTGSKILKEYNVSNTQLQSDRLYLYLLQDGKDMYTGKELDYDNLSQYDIDHIIPQSFIKDNSIDNTVLTTQASNRGKSDNVPNIETVNKMKSFWYKQLKSGAISQRKFDHLTKAERGALSDFDKAGFIKRQLVETRQITKHVAQILDSRFNSNLTEDSKSNRNVKIITLKSKMVSDFRKDFGFYKLREVNDYHHAQDAYLNAVVGTALLKKYPKLEAEFVYGDYKHYDLPDSSLGKATTRMFFYSNLMNFFKKEIKLADDTIFTRPQIEVNTETGEIVWDKVKDMQTIRKVMSYPQVNIVMKTEVQTGGFSKESIWPKGDSDKLIARKKSWDPKKYGGFDSPIIAYSVLVVAKIAKGKTQKLKTIKELVGIKIMEQDEFEKDPIAFLEKKGYQDIQTSSIIKLPKYSLFELENGRKRLLASELQKGNELALPNKYVKFLYLASHYTKFTGKEEDREKKRSYVESHLYXFX

SEQ ID NO: 118 - protein, 199 aa, Streptococcus iniae
MEQDEFEKDPIAFLEKKGYQDIQTSSIIKLPKYSLFELENGRKRLLASKELQKGNELALPNKYVKFLYLASHYTKFTGKEEDREKKRSYVESHLYYFDEIMQIIVEYSNRYILADSNLIKIQNLYKEKDNFSIEEQAINMLNLFTFTDLGAPSAFKFFNGDIDRKRYSSTNEIINSTLIYQSPTGLYETRIDLSKLGGK

SEQ ID NO: 119 - protein, 1271 aa, Streptococcus iniae
MRKPYSIGLDIGTNSVGWAVITDDYKVPSKKMRIQGTTDRTSIKKNLIGALLFDNGETAEATRLKRTTRRRYTRRKYRIKELQKIFSSEMNELDIAFFPRLSESFLVSDDKEFENHPIFGNLKDEITYHNDYPTIYHLRQTLADSDQKADLRLIYLALAHIIKFRGHFLIEGNLDSENTDVHVLFLNLVNIYNNLFEEDVETASIDAEKILTSKTSKSRRLENLIAEIPNQKRNMLFGNLVSLALGLTPNFKTNFELLEDAKLQISKDSYEEDLDNLLAQIGDQYADLFIAAKKLSDAILLSDIITVKGASTKAPLSASMVQRYEEHQQDLALLKNLVKKQIPEKYKEIFDNKEKNGYAGYIDGKTSQEEFYKYIKPILLKLDGTEKLISKLEREDFLRKQRTFDNGSIPHQIHLNELKAIIRRQEKFYPFLKENQKKIEKLFTFKIPYYVGPLANGQSSFAWLKRQSNESITPWNFEEVVDQEASARAFIERMTNFDTYLPEEKVLPKHSPLYEMFMVYNELTKVKYQTEGMKRPVFLSSEDKEEIVNLLFKKERKVTVKQLKEEYFSKMKCFHTVTILGVEDRFNASLGTYHDLLKIFKDKAFLDDEANQDILEEIVWTLTLFEDQAMIERRLVKYADVFEKSVLKKLKKRHYTGWGRLSQKLINGIKDKQTGKTILGFLKDGVANRNFMQLINDSSLDFAKIIKNEQEKTIKNESLEETIANLAGSPAIKKGILQSIKIVDEIVKIMGQNPDNIVIEMARENQSTMQGIKNSRQRLRKLEEVHKNTGSKILKEYNVSNTQLQSDRLYLYLLQDGKDMYTGKELDYDNLSQYDIDHIIPQSFIKDNSIDNTVLTTQASNRGKSDNVPNIETVNKMKSFWYKQLKSGAISQRKFDHLTKAERGALSDFDKAGFIKRQLVETRQITKHVAQILDSRFNSNLTEDSKSNRNVKIITLKSKMVSDFRKDFGFYKLREVNDYHHAQDAYLNAVVGTALLKKYPKLEAEFVYGDYKHYDLPDSSLGKATTRMFFYSNLMNFFKKEIKLADDTIFTRPQIEVNTETGEIVWDKVKDMQTIRKVMSYPQVNIVMKTEVQTGGFSKESIWPKGDSDKLIARKKSWDPKKYGGFDSPIIAYSVLVVAKIAKGKTQKLKTIKELVGIKIMEQDEFEKDPIAFLEKKGYQDIQTSSIIKLPKYSLFELENGRKRLLASELQKGNELALPNKYVKFLYLASHYTKFTGKEEDREKKRSYVESHLYYFDVRLSQVFRVTNVEF

SEQ ID NO: 120 - protein, 1345 aa, Streptococcus intermedius
MKKPYSIGLDIGTNSVGWAVVTDDYKVPAKKMKVLGNTDKSHIKKNLLGALLFDSGNTAEDRRLKRTARRRYTRRRNRILYLQEIFSEEMGKVDDSFFHRLEDSFLVTEDKRGERHPIFGNLEEEVKYHENFPTIYHLRQYLADNPEKTDLRLVYLALAHIIKFRGHFLIEGKFDTRNNDVQRLFQEFLAVYDNTFENSSLQEQNVQVEEILTDKISKSAKKDRVLKLFPNEKSNGRFAEFLKLIVGNQADFKKHFELEEKAPLQFSKDTYEEELEVLLAQIEDNYAELFLSAKKLYDSILLSGILTVTDVSTKAPLSASMIQRYNEHQMDLAQLKQFIRQKLSDKYNEVFSDVSKDGYAGYIDGKTNQEAFYKYLKGLLNKIEGSGYFLDKIEREDFLRKQRTFDNGSIPHQIHLQEMRAIIRRQAEFYPFLADNQDRIEKILTFRIPYYIGPLARGKSDFSWLSRKSADKITPWNFDEIVDKESSAEAFINRMTNYDLYLPNQKVLPRHSLLYEKFTVYNELTKVKYKTEQGKTAFFDANMKQEIFDGVFKVYRKVTKDKLMDFLEKEFDEFRIVDLTGLDKENKAFNASYGTYHDLRKILDKDFLDNSKNEKILEDIVLTLTLFEDREMIRKRLENYSDLLTKEQVKNLERRHYTGWGRLSAELIHGIRNKESRKTILDYLIDDGNSNRNFMQLINDDALSFKEEIAKAQVIGETDNLNQVVSDIAGSPAIKKGILQSLKIVDELVKIMGHQPENIVVEMARENQFTNQGRRNSQQRLKGLTDSIKEFGSQILKEHPVENSQLQNDRLFLYYLQNGRDMYTGEELDIDYLSQYDIDHIIPQAFIKDNSIDNRVLTSSKENRGKSDDVPSKDVVRKMKSYWSKLLSAKLITQRKFDNLTKAERGGLTDDDKAGFIKRQLVETRQITKHVARILDERFNTETDENNKKIRQVKIVTLKSNLVSNFRKEFELYKVREINDYHHAHDAYLNAVIGKALLGVYPQLEPEFVYGDYPHFHGHKENKATAKKFFYSNIMNFFKKDDVRTDKNGEIIWKKDEHISNIKKVLSYPQVNIVKKVEEQTGGFSKESILPKGNSDKLIPRKTKKFYWDTKKYGGFDSPIVAYSILVIANIEKGKSKKLKLVKDLVGITIMERTIFEKNPVAFLERKGYRNVQEENIVKLPKYSLFELENGRRRLLASARELQKGNEIVLPNHLGTMLYHAKNIHKVDEPKHLDYVKKHKDEFKELLDVVSNFSKKNILAESNLEKIEELYAQNNNKDITELASSFINLLTFTAIGAPAAFKFFDNNIDRKRYTSTTEILNATLIHQSITGLYETRIDLSRLGGD

SEQ ID NO: 121 - protein, 1333 aa, Streptococcus massiliensis
MKKPYSIGLDIGTNSVGWAVVMEDYKVPSKKMKVLGNTDKQSIKKNLIGALLFDSGETAVERRLNRTTSRRYDRRRNRIRYLQHIFAEEMNRADENFFHRLKESFFVEEDKTYSKYPIFGTLEEEKNYHKNYPTIYHLRKTLADTPDKMDIRLIYLALAHIIKYRGHFLIEGDLDIENIGIQDSFKSFIEEYNTQFGTKLDSTTKVEAIFTENSSKAKRVETILGLFPDETAAGNLDKFLKLMLGNQADFKKVFDLEEKITLQFSKDSYEEDLELLLSKIDEEYAALFDLAKKVYDAVLLSNILTVKEKNTKAPLSASMIKRYEEHKDDLKAFKRFFRERLPEKYETMFKDLTKPSYAAYVSGAVTEDDFYKFSKGLLIDVEGAEYFLEKIEREDFLRKQRTFDNGAIPNQVHVKELQAIILNQSKYYPFLAENKEKIEKILTFRIPYYVGPLARGNSSFAWLQRKSDEAIRPWNFEQVVDMETSASRFIERMTLHDLYLPDEKVLPRHSLIYEKYTVFNELTKVRFTPEGGKEVYFSKTDKENIFDSLFKRYRKVTKRKLKDFIEKELGYGYIDIDNIKGVEEQFNASYTTYQDLLKIIGDKEFLDNEENKDLLEEIIYILTVFEDRKMIEKRLSELNIPFENKIIKKLARKKYTGWGNLSRKLIDGIRNRETNRTILGHLIDDGFSNRNLMQLINDDGLDFKEIIRKAQTIENIDTNQALVSSLPGSPAIKKGILQSLNIVDEIIAIMGYAPTNIVIEMARENQTTQKGRDNSAQRLKKIEDGIKLGSDLLKQNPIQDNKDLQKEKLFLYYMQNGIDLYTGQPLNCDPDSLAFYDVDHIVPRSYIKNDSFDNKVLTTSKGNRKKLDDVPAKEVVEKMENTWRRLHAAGLISDIKLSYLMKGELTEEDKAGFIRRQLVETRQITKHVARLLDEKLNRKKNENGEKLRTTKIITLKSVFASRFRANFDLYKLRELNHYHHAHDAYLNAVVAQALLKVYPKFERELVYGSYVKESIFSRKATERMRMYNNILKFISKDKKDQETGEIVWDKKEIENIVKKVIYSSPVNIVKKREEQSGALFKQSNMAVGYNNKLIPRKKDWSVDKYGGFIEPAESYSLAIFYTDINGKKPKKKSTIIAISRMEKKDYEKEPERFLAQKGFERVEKTIKLPKYSLFEMEKGRRRLLASSGELQKGNQVLLPEHLIRLLSYAKKVDVLVKSKDDDYDLEEHRAEFAELLDCIKKFNDMYILASSNMSKIEEIYQKNIDAPIEEVARSFVLLNFTMMGAATDFKFFGQIIPRKRYPSTTECLKSTLIHQSVTGLYETRIDLSKLGEN

SEQ ID NO: 122 - protein, 1361 aa, Streptococcus mitis
NNKPYSIGLDIGTNSVGWAVITDDYKVPSKKMKVLGNTDKHFIKKNLLGALLFDEGTTAEDRRLKRTARRRYTRRKNRLRYLQEIFTEEMSKVDISFFHRLDDSFLVPEDKRGSKYPIFATLEEEKEYHKNFPTIYHLRKHLADSKEKADFRLIYLALAHIIKYRGHFLYEESFDIKNNDIQKIFNEFISIYDNTFEGSSLNGQNAQVEAIFTDKISKSAKRERVLKLFPDEKSTGLFSEFLKLIVGNQADFKKHFDLEEKAPLQFSKDTYDEDLENLLVQIGDDFADLFLVAKKLYDAILLSGILTVTDPSTKAPLSASMIDRYENHQKDLAALKQFIKTNLPEKYDEVFSDQSKDGYAGYIDGKTTQEAFYKYIKNLLSKLEGADYFLDKIEREDFLRKQRTFDNGSIPHQIHLQEMNAIIRRQGEHYPFLQENKEKIEKILTFRIPYYVGPLARGNRDFAWLTRNSDQAIRPWNFEEIVDKARSAEDFINKMTNYDLYLPEEKVLPKHSLLYETFAVYNELTKVKFIAEGLRDYQFLDSGQKQQIVTQLFKEKRKVTEKDIIQYLHNVDSYDGIELKGIEKQFNASLSTYHDLLKIIKDKEFMDDSKNEAILENIVHTLTIFEDREMIKQRLAHYASIFDEKVIKALTRRHYTGWGKLSAKLINGIYDKQSKKTILDYLIDDGEINRNFMQLINDDGLSFKEIIQKAQVVGKTNDVKQVVQELPGSPAIKKGILQSIKLVDELVKVMGHAPESIVIEMARENQTTARGKKNSQQRYKRIEDALKNLAHNILKEHPTDNIQLQNDRLFLYYLQNGKDMYTGKSLDINQLSSCDIDHIIPQAFIKDDSLDNRVLTSSKDNRGKSDNVPSLEIVQKRKAFWQQLLDSKLISERKFNNLTKAERGGLDERDKVGFIKRQLVETRQITKHVAQILDARFNTEVTEKDKKDRSVKIITLKSNLVSNFRKEFRLYKVREINDYHHAHDPYLNAVVAKAILKKYPKLEPEFVYGDYQKYDLTKDPKEVEKATEKYFFYSNLLNFFKEEVHYADGTIVKRENIEYSKDTGEIAWNKEKDFATIKKVLSLPQVNIVKKTEEQTGGLFDNNIVSKKKVVDASKLTPIKSGLSPEKYGGYARPTIAYSVLVIADIEKGKAKKLKRIKEMVGITVQDKKKFEANPIAYLEECGYKNINPNLIIKLPKYSLFEFNNGQRRLLASSIELQKGNELIVPYHFTALLYHAQRINKISEPIHKQYVETHQSEFKELLTAIISLSKKYIQKPNVESLLQQAFDQSDKDIYQLSESFISLLKLISFGAPGTFKFLGVEISQSNVRYQSVSSCFNATLIHQSITGLYETRIDLSKLGED

SEQ ID NO: 123 - protein, 1359 aa, Streptococcus mitis; identical to SEQ ID NO: 13

SEQ ID NO: 124 - protein, 1345 aa, Streptococcus mutans
MKKPYSIGLDIGTNSVGWAVVTDDYKVPAKKMKVLGNTDKSHIEKNLLGALLFDSGNTAEDRRLKRTARRRYTRRRNRILYLQEIFSEEMGKVDDSFFHRLEDSFLVTEDKRGERHPIFGNLEEEVKYHENFPTIYHLRQYLADNPEKVDLRLVYLALAHIIKFRGHFLIEGKFDTRNNDVQRLFQEFLAVYDNTFENSSLQEQNVQVEEILTDKISKSAKKDRVLKLFPNEKSNGRFAEFLKLIVGNQADFKKHFELEEKAPLQFSKDTYEEELEVLLAQIGDNYAELFLSAKKLYDSILLSGILTVTDVGTKAPLSASMIQRYNEHQMDLAQLKQFIRQKLSDKYNEVFSDVSKDGYAGYIDGKTNQEAFYKYLKGLLNKIEGSGYFLDKIEREDFLRKQRTFDNGSIPHQIHLQEMRAIIRRQAEFYPFLADNQDRIEKLLTFRIPYYVGPLARGKSDFAWLSRKSADKITPWNFDEIVDKESSAEAFINRMTNYDLYLPNQKVLPKHSLLYEKFTVYNELTKVKYKTEQGKTAFFDANMKQEIFDGVFKVYRKVTKDKLMDFLEKEFDEFRIVDLTGLDKENKVFNASYGTYHDLCKILDKDFLDNSKNEKILEDIVLTLTLFEDREMIRKRLENYSDLLTKEQVKKLERRHYTGWGRLSAELIHGIRNKESRKTILDYLIDDGNSNRNFMQLINDDALSFKEEIAKAQVIGETDNLNQVVSDIAGSPAIKKGILQSLKIVDELVKIMGHQPENIVVEMARENQFTNQGRRNSQQRLKGLTDSIKEFGSQILKEHPVENSQLQNDRLFLYYLQNGRDMYTGEELDIDYLSQYDIDHIIPQAFIKDNSIDNRVLTSSKENRGKSDDVPSKDVVRKMKSYWSKLLSAKLITQRKFDNLTKAERGGLTDDDKAGFIKRQLVETRQITKHVARILDERFNTETDENNKKIRQVKIVTLKSNLVSNFRKEFELYKVREINDYHHAHDAYLNAVIGKALLGVYPQLEPEFVYGDYPHFHGHKENKATAKKFFYSNIMNFFKKDDVRTDKNGEIIWKKDEHISNIKKVLSYPQVNIVKKVEEQTGGFSKESILPKGNSDKLIPRKTKKFYWDTKKYGGFDSPIVAYSILVIADIEKGKSKKLKTVKALVGVTIMEKMTFERDPVAFLERKGYRNVQEENIIKLPKYSLFKLENGRKRLLASARELQKGNEIVLPNHLGTLLYHAKNIHKVDEPKHLDYVDKHKDEFKELLDVVSNFSKKYTLAEGNLEKIKELYAQNNGEDLKELASSFINLLTFTAIGAPATFKFFDKNIDRKRYTSTTEILNATLIHQSITGLYETRIDLNKLGGD

SEQ ID NO: 125 - protein, 1345 aa, Streptococcus mutans
MKKPYSIGLDIGTNSVGWAVVTDDYKVPAKKMKVLGNTDKSHIEKNLLGALLFDSGNTAEDRRLKRTARRRYTRRRNRILYLQEIFSEEMGKVDDSFFHRLEDSFLVTEDKRGERHPIFGNLEEEVKYHENFPTIYHLRQYLADNPEKVDLRLVYLALAHIIKFRGHFLIEGKFDTRNNDVQRLFQEFLAVYDNTFENSSLQEQNVQVEEILTDKISKSAKKDRVLKLFPNEKSNGRFAEFLKLIVGNQADFKKHFELEEKAPLQFSKDTYEEELEVLLAQIGDNYAELFLSAKKLYDSILLSGILTVTDVGTKAPLSASMIQRYNEHQMDLAQLKQFIRQKLSDKYNEVFSDVSKDGYAGYIDGKTNQEAFYKYLKGLLNKIEGSGYFLDKIEREDFLRKQRTFDNGSIPHQIHLQEMRAIIRRQAEFYPFLADNQDRIEKLLTFRIPYYVGPLARGKSDFAWLSRKSADKITPWNFDEIVDKESSAEAFINRMTNYDLYLPNQKVLPKHSLLYEKFTVYNELIKVKYKTEQGKTAFFDANMKQEIFDGVFKVYRKVTKDKLMDFLEKEFDEFRIVDLTGLDKENKVFNASYGTYHDLCKILDKDFLDNSKNEKILEDIVLTLTLFEDREMIRKRLENYSDLLTKEQVKKLERRHYTGWGRLSAELIHGIRNKESRKTILDYLIDDGNSNRNFMQLINDDALSFKEEIAKAQVIGETDNLNQVVSDIAGSPAIKKGILQSLKIVDELVKIMGHQPENIVVEMARENQFTNQGRRNSQQRLKGLTDSIKEFGSQILKEHPVENSQLQNDRLFLYYLQNGRDMYTGEELDIDYLSQYDIDHIIPQAFIKDNSIDNRVLTSSKENRGKSDDVPSKDVVRKMKSYWSKLLSAKLITQRKFDNLTKAERGGLTDDDKAGFIKRQLVETRQITKHVARILDERFNTETDENNKKIRQVKIVTLKSNLVSNFRKEFELYKVREINDYHHAHDAYLNAVIGKALLGVYPQLEPEFVYGDYPHFHGHKENKATAKKFFYSNIMNFFKKDDVRTDKNGEIIWKKDEHISNIKKVLSYPQVNIVKKVEEQTGGFSKESILPKGNSDKLIPRKTKKFYWDTKKYGGFDSPIVAYSILVIADIEKGKSKKLKTVKALVGVTIMEKMTFERDPVAFLERKGYRNVQEENIIKLPKYSLFKLENGRKRLLASARELQKGNEIVLPNHLGTLLYHAKNIHKVDEPKHLDYVDKHKDEFKELLDVVSNFSKKYTLAEGNLEKIKELYAQNNGEDLKELASSFINLLTFTAIGAPATFKFFDKNIDRKRYTSTTEILNATLIHQSITGLYETRIDLNKLGGD

SEQ ID NO: 126 - protein, 1345 aa, Streptococcus mutans
MKKPYSIGLDIGTNSVGWAVVTDDYKVPAKKMKVLGNTDKSHIKKNLLGALLFDSGNTAEDRRLKRTARRRYTRRRNRILYLQEIFSEEMGKVDDSFFHRLDESFLTDDDKNFDSYPIFGNKAEEDAYHQKFPTIYHLRKHLADSTEKADLRLVYLALAHMIKFRGHFLIEGELNAENTDVQKLFADFVGVYDRTFDDSHLSEITVDASSILTEKISKSRRLEKLINNYPKEKKNTLFRNLVALSLGLQPNFKTNFKLSEDAKLQFSKDTYEEDLEELLGKIGDDYADLFTLAKNLYDAILLSGILTADDSSTKAPLSASMIKRYAEHHEDLEKLKEFIKANKPELYHDIFKDETKNGYAGYIENGVKQDEFYKYLKNTLSKIAGSDYFLDKIEREDFLRKQRTFDNGSIPHQIHLQEMHAILRRQGDYYPFLKENQDRIEKILTFRIPYYVGPLARGKSDFAWLSRKSADKITPWNFDEIVDKESSVEAFINRMTNYDLYLPNQKVLPKHSLLYEKFTVYNELTKVKYKTEQGKTAFFDANMKQEIFDGVFKVYRKVTKDKLMDFLEKEFDEFRIVDLTGLDKENKAFNASYGTYHDLRKILDKDFLDNSKNEKILEDIVLTLTLFEDREMIRKRLKNYSDLLTKEQLKKLERRHYTGWGRLSAELIHGIRNKESRKTILDYLIDDGNSNRNFMQLINDDALSFKEEIAKAQVIGETDNLNQVVSDIAGSPAIKKGILQSLKIVDELVKIMGHQPENIVVEMARENQFTNQGRRNSQQRLKGLTDSIKEFGSQILKEHPVENSQLQNDRLFLYYLQNGRDMYTGEELDIDYLSQYDIDHIIPQAFIKDNSIDNRVLTSSKENRGKSDDVPSKDVVRKMKSYWSKLLSAKLITQRKFDNLTKGERGGLTDDDKAGFIKRQLVETRQITKHVARILDERFNTETDENNKKIRQVKIVTLKSNLVSNFRKEFELYKVREINDYHHAHDAYLNAVIGKALLGVYPQLEPEFVYGDYPHFHGHKENKATAKKFFYSNIMNFFKKDDVRTDKNGEIIWKKDEYISNIKKVLSYPQVNIVKKVEEQTGGFSKESILPKGDSDKLIPRKTKKFYWDTKKYGGFDSPIVAYSILVIADIEKGKSKKLKTVKALVGVTIMEKMTFERDPVAFLERKGYRNVQEENIIKLPKYSLFKLENGRKRLLASARELQKGNEIVLPNHLGTLLYHAKNIHKVDEPKHLDYVDKHKDEFKELLDVVSNFSKKYTLAEGNLEKIKELYAQNNGEDLKELASSFINLLTFTAIGAPATFKFFDKNIDRKRYTSTTEILNATLIHQSITGLYETRIDLSKLGGD

SEQ ID NO: 127 - protein, 1345 aa, Streptococcus mutans
MKKPYSIGLDIGTNSVGWAVVTDDYKVPAKKMKVLGNTDKSHIKKNLLGALLFDSGNTAEDRRLKRTARRRYTRRRNRILYLQEIFSEEMGKVDDSFFHRLEDSFLVTEDKRGERHPIFGNLEEEVKYHENFPTIYHLRQYLADNPEKTDLRLVYLALAHIIKFRGHFLIEGKFDTRNNDVQRLFQEFLAVYDNTFENSSLQEQNVQVEEILTDKISKSAKKDRVLKLFPNEKSNGRFAEFLKLIVGNQADFKKHFELEEKAPLQFSKDIYEEELEVLLAQIGDNYAELFLSAKKLYDSILLSGILTVTDVSTKAPLSASMIQRYNEHQMDLAQLKQFIRQKLSDKYNEVFSDVSKDGYAGYIDGKTNQEAFYKYLKGLLNKIEGSGYFLDKIEREDFLRKQRTFDNGSIPHQIHLQEMRAIIRRQAEFYPFLADNQDRIEKILTFRIPYYVGPLARGKSDFAWLSRKSADKITPWNFDEIVDKESSVEAFINRMTNYDLYLPNQKVLPKHSLLYEKFTVYNELTKVKYKTEQGKTAFFDANMKQEIFDGVFKVYRKVTKDKLMDFLEKEFDEFRIVDLTGLDKENKAFNASYGTYHDLRKILDKDFLDNSKNEKILEDIVLTLTLFEDREMIRKRLKNYSDLLTKEQLKKLERRHYTGWGRLSAELIHGIRNKESRKTILDYLIDDGNSNRNFMQLINDDALSFKEEIAKAQVIGETDNLNQVVSDIAGSPAIKKGILQSLKIVDELVKIMGHQPENIVVEMARENQFTNQGRRNSQQRLKGLTDSIKEFGSQILKEHPVENSQLQNDRLFLYYLQNGRDMYTGEELDIDYLSQYDIDHIIPQAFIKDNSIDNRVLTSSKENRGKSDDVPSKDVVRKMKSYWSKLLSAKLITQRKFDNLTKAERGGLTDDDKAGFIKRQLVETRQITKHVARILDERFNTETDENNKKIRQVKIVTLKSNLVSNFRKEFELYKVREINDYHHAHDAYLNAVIGKALLGVYPQLEPEFVYGDYPHFHGHKENKATAKKFFYSNIMNFFKKDDVRTDKNGEIIWKKDEHISNIKKVLSYPQVNIVKKVEEQTGGFSKESILPKGNSDKLIPRKTKKFYWDTKKYGGFDSPIVAYSILVIADIEKGKSKKLKTVKALVGVTIMEKMTFERDPVAFLERKGYRNVQEENIIKLPKYSLFKLENGRKRLLASARELQKGNEIVLPNHLGTLLYHAKNIHKVDEPKHLDYVDKHKDEFKELLDVVSNFSKKYTLAEGNLEKIKELYAQNNGEDLKELASSFINLLTFTAIGAPATFKFFDKNIDRKRYTSTTEILNATLIHQSITGLYETRIDLNKLGGD

SEQ ID NO: 128 - protein, 1345 aa, Streptococcus mutans
MKKPYSIGLDIGTNSVGWAVVTDDYKVPAKKMKVLGNTDKSHIKKNLLGALLFDSGNTAEDRRLKRTARRRYTRRRNRILYLQEIFSEEMGKVDDSFFHRLEDSFLVTEDKRGERHPIFGNLEEEVKYHENFPTIYHLRQYLADNPEKVDLRLVYLALAHIIKFRGHFLIEGKFDTRNNDVQRLFQEFLAVYDNTFENSSLQEQNVQVEEILTDKISKSAKKDRVLKLFPNEKSNGRFAEFLKLIVGNQADFKKHFELEEKAPLQFSKDTYEEELEVLLAQIGDNYAELFLSAKKLYDSILLSGILTVTDVSTKAPLSASMIQRYNEHQMDLAQLKQFIRQKLSDKYNEVFSDVSKDGYAGYIDGKTNQEAFYKYLKGLLNKIEGSGYFLDKIEREDFLRKQRTFDNGSIPHQIHLQEMRAIIRRQAEFYPFLADNQDRIEKILTFRIPYYVGPLARGKSDFAWLSRKSADKITPWNFDEIVDKESSAEAFINRMTNYDLYLPNQKVLPKHSLLYEKFTVYNELTKVKYKTEQGKTAFFDANMKQEIFDGVFKVYRKVTKDKLMDFLEKEFDEFRIVDLTGLDKENKVFNASYGTYHDLCKILDKDFLDNSKNEKILEDIVLTLTLFEDREMIRKRLENYSDLLTKEQVKKLERRHYTGWGRLSAELIHGIRNKESRKTILDYLIDDGNSNRNFMQLINDDALSFKEEIAKAQVIGETDNLNQVVSDIAGSPAIKKGILQSLKIVDELVKIMGHQPENIVVEMARENQFTNQGRQNSQQRLKGLTDSIKEFGSQILKEHPVENSQLQNDRLFLYYLQNGRDMYTGEELDIDYLSQYDIDHIIPQAFIKDNSIDNRVLTSSKENRGKSDDVPSEDVVRKMKSYWSKLLSAKLITQRKFDNLTKAERGGLTDDDKAGFIKRQLVETRQITKHVARILDERFYTETDENNKKIRQVKIVTLKSNLVSNFRKEFELYKVREINDYHHAHDAYLNAVIGKALLGVYPQLEPEFVYGDYPHFHGHKENKATAKKFFYSNIMNFFKKDDVRTDKNGEIIWKKDEHISNIKKVLSYPQVNIVKKVEEQTGGFSKESILPKGNSDKLIPRKTKKFYWDTKKYGGFDSPIVAYSILVIADIEKGKSKKLKTVKALVGVTIMEKMTFERDPVAFLERKGYRNVQEENIIKLPKYSLFKLENGRKRLLASARELQKGNEIVLPNHLGTLLYHAKNIHKVDEPKHLDYVDKHKDEFKELLDVVSNFSKKYTLAEGNLEKIKELYAQNNGEDLKELASSFINLLTFTAIGAPATFKFFDKNIDRKRYTSTTEILNATLIHQSITGLYETRIDLSKLGGD

SEQ ID NO: 129 - protein, 1345 aa, Streptococcus mutans
MKKPYSIGLDIGTNSVGWAVVTDDYKVPAKKMKVLGNTDKSHIKKNLLGALLFDSGNTAEDRRLKRTARRRYTRRRNRILYLQEIFSEEMGKVDDSFFHRLEDSFLVTEDKRGERHPIFGNLEEEVKYHENFPTIYHLRQYLADNPEKVDLRLVYLALAHIIKFRGHFLIEGKFDTRNNDVQRLFQEFLAVYDNTFENSSLQEQNVQVEEILTDKISKSAKKDRVLKLFPNEKSNGRFAEFLKLIVGNQADFKKHFELEEKAPLQFSKDTYEEDLEELLGKIGDDYADLFTLAKNLYDAILLSGILTADDSSTKAPLSASMIQRYNEHQMDLAQLKQFIRQKLSDKYNEVFSDVSKDGYAGYIDGKTNQEAFYKYLKGLLNKIEGSGYFLDKIEREDFLRKQRTFDNGSIPHQIHLQEMRAIIRRQAEFYPFLADNQDRIEKILTFRIPYYVGPLARGKSDFAWLSRKSADKITPWNFDEIVDKESSAEAFINRMTNYDLYLPNQKVLPKHSLLYEKFTVYNELTKVKYKTEQGKTAFFDANMKQEIFDGVFKVYRKVTKDKLMDFLEKEFDEFRIVDLTGLDKENKVFNASYGTYHDLCKILDKDFLDNSKNEKILEDIVLTLTLFEDREMIRKRLENYSDLLTKEQVKKLERRHYTGWGRLSAELIHGIRNKESRKTILDYLIDDGNSNRNFMQLINDDALSFKEEIAKAQVIGETDNLNQVVSDIAGSPAIKKGILQSLKIVDELVKIMGHQPENIVVEMARENQFTNQGRRNSQQRLKGLTDSIKEFGSQILKEHPVENSQLQNDRLFLYYLQNGRDMYTGEELDIDYLSQYDIDHIIPQAFIKDNSIDNRVLTSSKENRGKSDDVPSKDVVRKMKSYWSKLLSAKLITQRKFDNLTKAERGGLTDDDKAGFIKRQLVETRQITKHVARILDERFYTETDENNKKIRQVKIVTLKSNLVSNFRKEFELYKVREINDYHHAHDAYLNAVIGKALLGVYPQLEPEFVYGDYPHFHGHKENKATAKKFFYSNIMNFFKKDDVRTDKNGEIIWKKDEHISNIKKVLSYPQVNIVKKVEEQTGGFSKESILPKGNSDKLIPRKTKKFYWDTKKYGGFDSPIVAYSILVIADIEKGKSKKLKTVKALVGVTIMEKMTFERDPVAFLERKGYRNVQEENIIKLPKYSLFKLENGRKRLLASARELQKGNEIVLPNHLGTLLYHAKNIHKVDEPKHLDYVDKHKDEFKELLDVVSNFSKKYTLAEGNLEKIKELYAQNNGEDLKELASSFINLLTFTAIGAPATFKFFDKNIDRKRYTSTTEILNATLIHQSITGLYETRIDLSKLGGD

SEQ ID NO: 130 - protein, 1345 aa, Streptococcus mutans
MKKPYSIGLDIGTNSVGWAVVTDDYKVPAKKMKVLGNTDKSHIKKNLLGALLFDSGNTAEDRRLKRTARRRYTRRRNRILYLQEIFSEEMGKVDDSFFHRLEDSFLVTEDKRGERHPIFGNLEEEVKYHENFPTIYHLRQYLADNPEKVDLRLVYLALAHIIKFRGHFLIEGKFDTRNNDVQRLFQEFLAVYDNTFENSSLQEQNVQVEEILTDKISKSAKKDRVLKLFPNEKSNGRFAEFLKLIVGNQADFKKHFELEEKAPLQFSKDTYEEDLEELLGKIGDDYADLFTLAKNLYDAILLSGILTADDSSTKAPLSASMIQRYNEHQMDLAQLKQFIRQKLSDKYNEVFSDVSKDGYAGYIDGKTNQEAFYKYLKGLLNKIEGSGYFLDKIEREDFLRKQRTFDNGSIPHQIHLQEMRAIIRRQAEFYPFLADNQDRIEKILTFRIPYYVGPLARGKSDFAWLSRKSADKITPWNFDEIVDKESSAEAFINRMTNYDLYLPNQKVLPKHSLLYEKFTVYNELTKVKYKTEQGKTAFFDANMKQEIFDGVFKVYRKVTKDKLMDFLEKEFDEFRIVDLTGLDKENKVFNASYGTYHDLCKILDKDFLDNSKNEKILEDIVLTLTLFEDREMIRKRLENYSDLLTKEQVKKLERRHYTGWGRLSAELIHGIRNKESRKTILDYLIDDGNSNRNFMQLINDDALSFKEEIAKAQVIGETDNLNQVVSDIAGSPAIKKGILQSLKIVDELVKIMGHQPENIVVEMARENQFTNQGRRNSQQRLKGLTDSIKEFGSQILKEHPVENSQLQNDRLFLYYLQNGRDMYTGEELDIDYLSQYDIDHIIPQAFIKDNSIDNRVLTSSKENRGKSDDVPSKDVVRKMKPYWSKLLSAKLITQRKFDNLTKAERGGLTDDDKAGFIKRQLVETRQITKHVARILDERFNTETDENNKKIRQVKIVTLKSNLVSNFRKEFELYKVREINDYHHAHDAYLNAVIGKALLGVYPQLEPEFVYGDYPHFHGHEENKATAKKFFYSNIMNFFKKDDVRTDKNGEIIWKKDEHISNIKKVLSYPQVNIVKKVEEQTGGFSKESILPKGNSDKLIPRKTKKFYWDTKKYGGFDSPIVAYSILVIADIEKGKSKKLKTVKALVGVTIMEKMTFERDPVAFLERKGYRNVQEENIIKLPKYSLFKLENGRKRLLASARELQKGNEIVLPNHLGTLLYHAKNIHKVDEPKHLDYVDKHKDEFKELLDVVSNFSKKYTLAEGNLEKIKELYAQNNGEDLKELASSFINLLTFTAIGAPATFKFFDKNIDRKRYTSTTEILNATLIHQSITGLYETRIDLSKLGGD

SEQ ID NO: 131 - protein, 1345 aa, Streptococcus mutans
MKKPYSIGLDIGTNSVGWAVVTDDYKVPAKKMKVLGNTDKSHIKKNLLGALLFDSGNTAEDRRLKRTARRRYTRRRNRILYLQEIFSEEMGKVDDSFFHRLEDSFLVTEDKRGERHPIFGNLEEEVKYHENFPTIYHLRQYLADNPEKVDLRLVYLALAHIIKFRGHFLIEGKFDTRNNDVQRLFQEFLAVYDNTFENSSLQEQNVQVEEILTDKISKSAKKDRVLKLFPNEKSNGRFAEFLKLIVGNQADFKKHFELEEKAPLQFSKDTYEEELEVLLAQIGDNYAELFLSAKKLYDSILLSGILTVTDVSTKAPLSASMIQRYNEHQMDLAQLKQFIRQKLSDKYNEVFSDVSKDGYAGYIDGKTNQEAFYKYLKGLLNKIEGSGYFLDKIEREDFLRKQRTFDNGSIPHQIHLQEMRAIIRRQAEFYPFLADNQDRIEKILTFRIPYYVGPLARGKSDFAWLSRKSADKITPWNFDEIVDKESSAEAFINRMTNYDLYLPNQKVLPKHSLLYEKFTVYNELTKVKYKTEQGKTAFFDANMKQEIFDGVFKVYRKVTKDKLMDFLEKEFDEFRIVDLTGLDKENKVFNASYGTYHDLCKILDKDFLDNSKNEKILEDIVLTLTLFEDREMIRKRLENYSDLLTKEQVKKLERRHYTGWGRLSAELIHGIRNKESRKTILDYLIDDGNSNRNFMQLINDDALSFKEEIAKAQVIGETDNLNQVVSDIAGSPAIKKGILQSLKIVDELVKIMGHQPENIVVEMARENQFTKQGRRNSQQRLKGLTDSIKEFGSQILKEHPVENSQLQNDRLFLYYLQNGRDMYTGEELDIDYLSQYDIDHIIPQAFIKDNSIDNRVLTSSKENRGKSDDVPSKDVVRKMKSYWSKLLSAKLITQRKFDNLTKAERGGLTDDDKAGFIKRQLVETRQITKHVARILDERFYTETDENNKKIRQVKIVTLKSNLVSNFRKEFELYKVREINDYHHAHDAYLNAVIGKALLGVYPQLEPEFVYGDYPHFHGHKENKATAKKFFYSNIMNFFKKDDVRTDKNGEIIWKKDEHISNIKKVLSYPQVNIVKKVEEQTGGFSKESILPKGNSDKLIPRKTKKFYWDTKKYGGFDSPIVAYSILVIADIEKGKSKKLKTVKALVGVTIMEKMTFERDPVAFLERKGYRNVQEENIIKLPKYSLFKLENGRKRLLASARELQKGNEIVLPNHLGTLLYHAKNIHKVDEPKHLDYVDKHKDEFKELLDVVSNFSKKYTLAEGNLEKIKELYAQNNGEDLKELASSFINLLTFTAIGAPATFKFFDKNIDRKRYTSTTEILNATLIHQSITGLYETRIDLSKLGGD

SEQ ID NO: 132 - protein, 1345 aa, Streptococcus mutans
MKKPYSIGLDIGTNSVGWAVVTDDYKVPAKKMKVLGNTDKSHIKKNLLGALLFDSGNTAADRRLKRTARRRYTRRRNRILYLQEIFAEEMSKVDDSFFHRLEDSFLVTEDKRGERHPIFGNLEEEVKYHENFPTIYHLRQYLADNPEKVDLRLVYLALAHIIKFRGHFLIEGKFDTRNNDVQRLFQEFLAVYDNTFENSSLQEQNVQVEEILTDKISKSAKKDRVLKLFPNEKSNGRFAEFLKLIVGNQADFKKHFELEEKAPLQFSKDTYEEELEVLLTQIGDNYAELFLSAKKLYDSILLSGILTVTDVSTKAPLSASMIQRYNEHQMDLAQLKQFIRQKLSDKYNEVFSDVSKDGYAGYIDGKTNQEAFYKYLKGLLNKIEGSGYFLDKIEREDFLRKQRTFDNGSIPHQIHLQEMRAIIRRQAEFYPFLADNQDRIEKILTFRIPYYVGPLARGKSDFAWLSRKSADKITPWNFDEIVDKESSAEAFINRMTNYDLYLPNQKVLPKHSLLYEKFTVYNELTKVKYKTEQGKTAFFDANMKQEIFDGVFKVYRKVTKDKLMDFLEKEFDEFRIVDLTGLDKENKAFNASYGTYHDLRKILDKDFLDNSKNEKILEDIVLTLTLFEDREMIRKRLENYSDLLTKEQVKKLERRHYTGWGRLSAELIHGIRNKESRKTLLDYLIDDGNSNRNFMQLINDDALSFKEEIAKAQVIGETDNLNQVVSDIAGSPAIKKGILQSLKIVDELVKIMGHQPENIVVEMARENQFTNQGRRNSQQRLKGLTDSIKEFGSQILKEHPVENSQLQNDRLFLYYLQNGRDMYTGEELDIDYLSQYDIDHIIPQAFIKDNSIDNRVLTSSKENRGKSDDVPSKDVVRKMKPYWSKLLSAKLITQRKFDNLTKAERGGLTDDDKAGFIKRQLVETRQITKHVARILDERFNTETDENNKKIRQVKIVTLKSNLVSNFRKEFELYKVREINDYHHAHDAYLNAVIGKALLGVYPQLEPEFVYGDYPHFHGHEENKATAKKFFYSNIMNFFKKDDVRTDKNGEIIWKKDEHISNIKKVLSYPQVNIVKKVEEQTGGFSKESILPKGNSDKLIPRKTKKFYWDTKKYGGFDSPIVAYSILVIADIEKGKSKKLKTVKALVGVTIMEKMTFERDPVAFLERKGYRNVQEENIIKLPKYSLFKLENGRKRLLASARELQKGNEIVLPNHLGTLLYHAKNIHKVDEPKHLDYVDKHKDEFKELLDVVSNFSKKYTLAEGNLEKIKELYAQNNGEDLKELSSSFINLLTFTAIGAPAAFKFFDKNIDRKRYTSTTEILNATLIHQSITGLYETRIDLSKLGGD

SEQ ID NO: 133 - protein, 1345 aa, Streptococcus mutans
MKKPYSIGLDIGTNSVGWAVVTDDYKVPAKKMKVLGNTDKSHIKKNLLGALLFDSGNTAEDRRLKRTARRRYTRRRNRILYLQEIFSEEMGKVDDSFFHRLEDSFLVTEDKRGERHPIFGNLEEEVKYHENFPTIYHLRQYLADNPEKVDLRLVYLALAHIIKFRGHFLIEGKFDTRNNDVQRLFQEFLAVYDNTFENSSLQEQNVQVEEILTDKISKSAKKDRVLKLFPNEKSNGRFAEFLKLIVGNQADFKKHFELEEKAPLQFSKDTYEEELEVLLAQIGDNYAELFLSAKKLYDSILLSGILTVTDVSTKAPLSASMIQRYNEHQMDLAQLKQFIRQKLSDKYNEVFSDVSKDGYAGYIDGKTNQEAFYKYLKGLLNKIEGSGYFLDKIEREDFLRKQRTFDNGSIPHQIHLQEMRAIIRRQAEFYPFLADNQDRIEKILTFRIPYYVGPLARGKSDFAWLSRKSADKITPWNFDEIVDKESSAEAFINRMTNYDLYLPNQKVLPKHSLLYEKFTVYNELTKVKYKTEQGKTAFFDANMKQEIFDGVFKVYRKVTKDKLMDFLEKEFDEFRIVDLTGLDKENKVFNASYGTYHDLCKILDKDFLDNSKNEKILEDIVLTLTLFEDREMIRKRLENYSDLLTKEQVKKLERRHYTGWGRLSAELIHGIRNKESRKTILDYLIDDGNSNRNFMQLINDDALSFKEEIAKAQVIGETDNLNQVVSDIAGSPAIKKGILQSLKIVDELVKIMGHQPENIVVEMARENQFTKQGRRNSQQRLKGLTDSIKEFGSQILKEHPVENSQLQNDRLFLYYLQNGRDMYTGEELDIDYLSQYDIDHIIPQAFIKDNSIDNRVLTSSKENRGKSDDVPSKDVVRKMKSYWSKLLSAKLITQRKFDNLTKAERGGLTDDDKAGFIKRQLVETRQITKHVARILDERFYTETDENNKKIRQVKIVTLKSNLVSNFRKEFELYKVREINDYHHAHDAYLNAVIGKALLGVYPQLEPEFVYGDYPHFHGHKENKATAKKFFYSNIMNFFKKDDVRTDRNGEIIWKKDEHISNIKKVLSYPQVNIVKKVEEQTGGFSKESILPKGNSDKLIPRKTKKFYWDTKKYGGFDSPIVAYSILVIADIEKGKSKKLKTVKALVGVTIMEKMTFERDPVAFLERKGYRNVQEENIIKLPKYSLFKLENGRKRLLASARELQKGNEIVLPNHLGTLLYHAKNIHKVDEPKHLDYVDKHKDEFKELLDVVSNFSKKYTLAEGNLEKIKELYAQNNGEDLKELASSFINLLTFTAIGAPATFKFFDKNIDRKRYTSTTEILNATLIHQSITGLYETRIDLSKLGGD

SEQ ID NO: 134 - protein, 1336 aa, Streptococcus mutans
MKKSYSIGLDIGTNSVGWAVVTDDYKVPAKKMKVLGNTDKSHIKKNLLGALLFDSGNTAEDRRLKRTARRRYTRRRNRILYLQEIFSEEMGKVDDSFFHRLDESFLTDDDKNFDSHPIFGNKAEEDAYHQKFPTIYHLRKHLADSTEKADLRLVYLALAHMIKFRGHFLIEGELNAENTDVQKLFADFVGVYDRTFDDSHLSEITVDASSILTEKISKSRRLEKLINNYPKEKKNTLFGNLIALSLGLQPNFKTNFKLSEDAKLQFSKDTYEEDLEELLGKIGDDYADLFTLAKNLYDAILLSGILTADDSSTKAPLSASMIKRYAEHHEDLEKLKEFIKANKPELYHDIFKDETKNGYAGYIENGVKQDEFYKYLKNTLSKIAGSDYFLDKIEREDFLRKQRTFDNGSIPHQIHLQEMHAILRRQGDYYPFLKENQDRIEKILTFRIPYYVGPLARKNSRFAWAEYHSDEAVMPWNFDQVIDKESSAQAFIEHMTNNDLYLPNEKVLPKHSPLYEKYTVYNELTKIKYVTEIGEAKFFDANLKQEIFDGLFKHERKVTKKKLRTFLDKNFDEFRIVDIQGLDKETETFNASYATYQDLLKVIKDKVFMDNPENAEILENIVLTLTLFEDREMIKQRLAKYADVFDKKVIDQLARRHYTGWGRLSAKLLNGIRDKQSCKTIMDYLIDDAQSNRNLMQLITDDNLTFKDDIVKAQYVDNSDDLHQVVQSLAGSPAIKKGILQSLKIVDELVKVMGKEPEQIVVEMARENQTTAKGRRNSQQRYKRLKEAIKDLNHKILKEHPTDNQALQNNRLFLYYLQNGRDMYTGESLDINRLSDYDIDHVIPQAFIKDNSIDNRVLTSSKANRGKSDDVPSEDVVNRMRPFWNKLLSSGLISQRKYNNLTKKELTPDDKAGFIKRQLVETRQITKHVARMLDERFNKEFDDNNKRIRRVKIVTLKSNLVSSFRKEFELYKVREINDYHHAHDAYLNAVVVKALLVKYPKLEPEFVYGEYPKYNSYRERKATQKMFFYSNIMNMFKSKVKLADDQIVERPMIEVNDETGEIAWDKTKHITTVKKVLSYPQVNIVKKVEEQTGGLFDPKSPLEKLVPLKKALNPEKYGGYQKPTTAYPILLIVDTKQLIPISVMDKKRFEQNPVKFLKDKGYQQIEKNNFVKLPKYTLVDIGNGIKRLWASSKEVHKGNQLVVSKKSQDLLYHAHHLDNDYSNEYVKNHYQQFDILFNEITSFSKKCKLGKEHIQKIEEAYSKERDSASIEELADGFIKLLGFTQLGATSPFSFLGIKLNQKQYTGKKDYLEATLIHQSITGLYETRIDLNKLGGD

SEQ ID NO: 135 - protein, 1345 aa, Streptococcus mutans
MKKPYSIGLDIGTNSVGWAVVTDDYKVPAKKMKVLGNTDKSHIKKNLLGALLFDSGNTAADRRLKRTARRRYTRRRNRILYLQEIFAEEMSKVDDSFFHRLEDSFLVTEDKRGERHPIFGNLEEEVKYHENFPTIYHLRQYLADNPEKVDLRLVYLALAHIIKFRGHFLIEGKFDTRNNDVQRLFQEFLAVYDNTFENSSLQEQNVQVEEILTDKISKSAKKDRVLKLFPNEKSNGRFAEFLKLIVGNQADFKKHFELEEKAPLQFSKDTYEEELEVLLAQIGDNYAELFLSAKKLYDSILLSGILTVTDVSTKAPLSASMIQRYNEHQMDLAQLKQFIRQKLSDKYNEVFSDVSKDGYAGYIDGKTNQEAFYKYLKGLLNKIEGSGYFLDKIEREDFLRKQRTFDNGSIPHQIHLQEMRAIIRRQAEFYPFLADNQDRIEKILTFRIPYYVGPLARGKSDFAWLSRKSADKITPWNFDEIVDKESSAEAFINRMTNYDLYLPNQKVLPKHSLLYEKFTVYNELTKVKYKTEQGKTAFFDANMKQEIFDGVFKVYRKVTKDKLMDFLEKEFDEFRIVDLTGLDKENKAFNASYGTYHDLRKILDKDFLDNSKNEKILEDIVLTLTLFEDREMIRKRLENYSDLLTKEQVKKLERRHYTGWGRLSAELIHGIRNKESRKTILDYLIDDGNSNRNFMQLINDDALSFKEEIAKAQVIGETDNLNQVVSDIAGSPAIKKGILQSLKIVDELVKIMGHQPENIVVEMARENQFTNQGRRNSQQRLKGLTDSIKEFGSQILKEHPVEHSQLQNDRLFLYYLQNGRDMYTGEELDIDYLSQYDIDHIIPQAFIKDNSIDNRVLTSSKENRGKSDDVPSKNVVRKMKSYWSKLLSAKLITQRKFDNLTKAERGGLTDDDKAGFIKRQLVETRQITKHVARILDERFHTETDENNKKIRQVKIVTLKSNLVSNFRKEFELYKVREINDYHHAHDAYLNAVIGKALLGVYPQLEPEFVYGDYPHFHGHKENKATAKKFFYSNIMNFFKKDDVRTDKNGEIIWKKDEHISNIKKVLSYPQVNIVKKVEEQTGGFSKESILPKGNSDKLIPRKTKKFYWDTKKYGGFDSPIVAYSILVIADIEKGKSKKLKTVKALVGVTIMEKMTFERDPVAFLERKGYRNVQEENIIKLPKYSLFKLENGRKRLLASARELQKGNEIVLPNHLGTLLYHAKNIHKVDEPKHLDYVDKHKDEFKELLDVVSNFSKKYTLAEGNLEKIKELYAQNNGEDLKELASSFINLLTFTAIGAPATFKFFDKNIDRKRYTSTTEILNATLIHQSITGLYETRIDLSKLGGD

SEQ ID NO: 136 - protein, 1345 aa, Streptococcus mutans
MKKPYSIGLDIGTNSVGWAVVTDDYKVPAKKMKVLGNTDKSHIEKNLLGALLFDSGNTAEDRRLKRTARRRYTRRRNRILYLQEIFSEEMGKVDDSFFHRLEDFFLVTEDKRGERHPIFGNLEEEVKYHENFPTIYHLRQYLADNPEKVDLRLVYLALAHIIKFRGHFLIEGKFDTRNNDVQRLFQEFLAVYDNTFENSSLQEQNVQVEEILTDKISKSAKKDRVLKLFPNEKSNGRFAEFLKLIVGNQADFKKHFELEEKAPLQFSKDTYEEELEVLLAQIGDNYAELFLSAKKLYDSILLSGILTADDSSTKAPLSASMIQRYNEHQMDLAQLKQFIRQKLSDKYNEVFSDVSKDGYAGYIDGKTNQEAFYKYLKGLLNKIEGSGYFLDKIEREDFLRKQRTFDNGSIPHQIHLQEMRAIIRRQSEFYPFLADNQDRIEKILTFRIPYYVGPLARGKSDFAWLSRKSADKITPWNFDEIVDKESSAEAFINRMTNYDLYLPNQKVLPKHSLLYEKFTVYNELTKVKYKTEQGETAFFDANMKQEIFDGVFKVYRKVTKDKLMDFLEKEFDEFRIVDLTGLDKENKAFNASYGTYHDLRKILDKDFLDNSKNEKILEDIVLTLTLFEDREMIRKRLKNYSDLLTKEQLKKLERRHYTGWGRLSAELIHGIRNKESRKTILDYLIDDGNSNRNFMQLINDDALSFKEEIAKAQVIGETDNLNQVVSDIAGSPAIKKGILQSLKIVDELVKIMGHQPENIVVEMARENQFTNQGRRNSQQRLKGLTDSIKEFGSQILKEHPVENSQLQNDRLFLYYLQNGRDMYTGEELDIDYLSQYDIDHIIPQAFIKDNSIDNRVLTSSKENRGKSDDVPSKDVVRKMKPYWSKLLSAKLITQRKFDNLTKAERGGLTDDDKAGFIKRQLVETRQITKHVARILDERFNTETDENNKKIRQVKIVTLKSNLVSNFRKEFELYKVREINDYHHAHDAYLNAVIGKALLGVYPQLEPEFVYGDYPHFHGHEENKATAKKFFYSNIMNFFKKDDVRTDKNGEIIWKKDEHISNIKKVLSYPQVNIVKKVEEQTGGFSKESILPKGNSDKLIPRKTKKFYWDTKKYGGFDSPIVAYSILVIADIEKGKSKKLKTVKALVGVTIMEKMTFERDPVAFLERKGYRNVQEENIIKLPKYSLFKLENGRKRLLASARELQKGNEIVLPNHLGTLLYHAKNIHKVDEPKHLDYVDKHKDEFKELLDVVSNFSKKYTLAEGNLEKIKELYAQNNGEDLKELASSFINLLTFTAIGAPATFKFFDKNIDRKRYTSTTEILNATLIHQSITGLYETRIDLSKLGGD

SEQ ID NO: 137 - protein, 1345 aa, Streptococcus mutans
MKKPYSIGLDIGTNSVGWAVVTDDYKVPAKKMKVLGNTDKSHIKKNLLGALLFDSGNTAEDRRLKRTARRRYTRRRNRILYLQEIFSEEMGKVDDSFFHRLDESFLTDDDKNFDSHPIFGNKAEEDAYHQKFPTIYHLRKHLADSTEKADLRLVYLALAHMIKFRGHFLIEGELNAENTDVQKLFADFVGVYDRTFDDSHLSEITVDASSILTEKISKSRRLEKLINNYPKEKKNTLFGNLIALSLGLQPNFKTNFKLSEDAKLQFSKDTYEEELEVLLAQIGDNYAELFLSAKKLYDSILLSGILTVTDVSTKAPLSASMIQRYNEHQMDLAQLKQFIRQKLSDKYNEVFSDVSKDGYAGYIDGKTNQEAFYKYLKGLLNKIEGSGYFLDKIEREDFLRKQRTFDNGSIPHQIHLQEMRAIIRRQAEFYPFLADNQDRIEKILTFRIPYYVGPLARGKSDFAWLSRKSADKITPWNFDEIVDKESSVEAFINRMTNYDLYLPNQKVLPKHSLLYEKFTVYNELTKVKYKTEQGKTAFFDANMKQEIFDGVFKVYRKVTKDKLMDFLEKEFDEFRIVDLTGLDKENKAFNASYGTYHDLRKILDKDFLDNSKNEKILEDIVLTLTLFEDREMIRKRLKNYSDLLTKEQLKKLERRHYTGWGRLSAELIHGIRNKESRKTILDYLIDDGNSNRNFMQLINDDALSFKEEIAKAQVIGETDNLNQVVSDIAGSPAIKKGILQSLKIVDELVKIMGHQPENIVVEMARENQFTNQGRRNSQQRLKGLTDSIKEFGSQILKEHPVENSQLQNDRLFLYYLQNGRDMYTGEELDIDYLSQYDIDHIIPQAFIKDNSIDNRVLTSSKENRGKSDDVPSKDVVRKMKSYWSKLLSAKLITQRKFDNLTKGERGGLTDDDKAGFIKRQLVETRQITKHVARILDERFNTETDENNKKIRQVKIVTLKSNLVSNFRKEFELYKVREINDYHHAHDAYLNAVIGKALLGVYPQLEPEFVYGDYPHFHGHKENKATAKKFFYSNIMNFFKKDDVRTDKNGEIIWKKDEYISNIKKVLSYPQVNIVKKVEEQTGGFSKESILPKGDSDKLIPRKTKKFYWDTKKYGGFDSPIVAYSILVIADIEKGKSKKLKTVKALVGVTIMEKMTFERDPVAFLERKGYRNVQEENIIKLPKYSLFKLENGRKRLLASARELQKGNEIVLPNHLGTLLYHAKNIHKVDEPKHLDYVDKHKDEFKELLDVVSNFSKKYTLAEGNLEKIKELYAQNNGEDLKELASSFINLLTFTAIGAPATFKFFDKNIDRKRYTSTTEILNATLIHQSITGLYETRIDLSKLGGD

SEQ ID NO: 138 - protein, 1345 aa, Streptococcus mutans
MKKPYSIGLDIGTNSVGWAVVTDDYKVPAKKMKVLGNTDKSHIKKNLLGALLFDSGNTAADRRLKRTARRRYTRRRNRILYLQEIFAEEMSKVDDSFFHRLEDSFLVTEDKRGERHPIFGNLEEEVKYHENFPTIYHLRQYLADNPEKVDLRLVYLALAHIIKFRGHFLIEGKFDTRNNDVQRLFQEFLAVYDNTFENSSLQEQNVQVEEILTDKISKSAKKDRVLKLFPNEKSNGRFAEFLKLIVGNQADFKKHFELEEKAPLQFSKDTYEEELEVLLAQIGDNYAELFLSAKKLYDSILLSGILTVTDVSTKAPLSASMIQRYNEHQMDLAQLKQFIRQKLSDKYNEVFSDVSKDGYAGYIDGKTNQEAFYKYLKGLLNKIEGSGYFLDKIEREDFLRKQRTFDNGSIPHQIHLQEMRAIIRRQAEFYPFLADNQDRIEKILTFRIPYYVGPLARGKSDFAWLSRKSADKITPWNFDEIVDKESSAEAFINRMTNYDLYLPNQKVLPKHSLLYEKFTVYNELTKVKYKTEQGKTAFFDANMKQEIFDGVFKVYRKVTKDKLMDFLEKEFDEFRIVDLTGLDKENKVFNASYGTYHDLCKILDKDFLDNSKNEKILEDIVLTLTLFEDREMIRKRLENYSDLLTKEQVKKLERRHYTGWGRLSAELIHGIRNKESRKTILDYLIDDGNSNRNFMQLINDDALSFKEEIAKAQVIGETDNLNQVVSDIAGSPAIKKGILQSLKIVDELVKIMGHQPENIVVEMARENQFTKQGRRNSQQRLKGLTDSIKEFGSQILKEHPVENSQLQNDRLFLYYLQNGRDMYTGEELDIDYLSQYDIDHIIPQAFIKDNSIDNRVLTSSKENRGKSDDVPSKDVVRKMKSYWSKLLSAKLITQRKFDNLTKAERGGLTDDDKAGFIKRQLVETRQITKHVARILDERFYTETDENNKKIRQVKIVTLKSNLVSNFRKEFELYKVREINDYHHAHDAYLNAVIGKALLGVYPQLEPEFVYGDYPHFHGHKENKATAKKFFYSNIMNFFKKDDVRTDKNGEIIWKKDEHISNIKKVLSYPQVNIVKKVEEQTGGFSKESILPKGNSDKLIPRKTKKFYWDTKKYGGFDSPIVAYSILVIADIEKGKSKKLKTVKALVGVTIMEKMTFERDPVAFLERKGYRNVQEENIIKLPKYSLFKLENGRKRLLASARELQKGNEIVLPNHLGTLLYHAKNIHKVDEPKHLDYVDKHKDEFKELLDVVSNFSKKYTLAEGNLEKIKELYAQNNGEDLKELASSFINLLTFTAIGAPATFKFFDKNIDRKRYTSTTEILNATLIHQSITGLYETRIDLSKLGGD

SEQ ID NO: 139 - protein, 1345 aa, Streptococcus mutans
MKKPYSIGLDIGTNSVGWAVVTDDYKVPAKKMKVLGNTDKSHIKKNLLGALLFDSGNTAADRRLKRTARRRYTRRRNRILYLQEIFAEEMSKVDDSFFHRLEDSFLVTEDKRGERHPIFGNLEEEVKYHENFPTIYHLRQYLADNPEKVDLRLVYLALAHIIKFRGHFLIEGKFDTRNNDVQRLFQEFLAVYDNTFENSSLQEQNVQVEEILTDKISKSAKKDRVLKLFPNEKSNGRFAEFLKLIVGNQADFKKHFELEEKAPLQFSKDTYEEELEVLLAQIGDNYAELFLSAKKLYDSILLSGILTVTDVSTKAPLSASMIQRYNEHQMDLAQLKQFIRQKLSDKYNEVFSDVSKDGYAGYIDGKTNQEAFYKYLKGLLNKIEGSGYFLDKIEREDFLRKQRTFDNGSIPHQIHLQEMRAIIRRQAEFYPFLADNQDRIEKILTFRIPYYVGPLARGKSDFAWLSRKSADKITPWNFDEIVDKESSAEAFINRMTNYDLYLPNQKVLPKHSLLYEKFTVYNELTKVKYKTEQGKTAFFDANMKQEIFDGVFKVYRKVTKDKLMDFLEKEFDEFRIVDLTGLDKENKAFNASYGTYHDLRKILDKDFLDNSKNEKILEDIVLTLTLFEDREMIRKRLENYSDLLTKEQVKKLERRHYTGWGRLSAELIHGIRNKESRKTILDYLIDDGNSNRNFMQLINDDALSFKEEIAKAQVIGETDNLNQVVSDIAGSPAIKKGILQSLKIVDELVKIMGHQPENIVVEMARENQFTNQGRRNSQQRLKGLTDSIKEFGSQILKEHPVENSQLQNDRLFLYYLQNGRDMYTGEELDIDYLSQYDIDHIIPQAFIKDNSIDNRVLTSSKENRGKSDDVPSKNVVRKMKSYWSKLLSAKLITQRKFDNLTKAERGGLTDDDKAGFIKRQLVETRQITKHVARILDERFHTETDENNKKIRQVKIVTLKSNLVSNFRKEFELYKVREINDYHHAHDAYLNAVIGKALLGVYPQLEPEFVYGDYPHFHGHKENKATAKKFFYSNIMNFFKKDDVRTDKNGEIIWKKDEHISNIKKVLSYPQVNIVKKVEEQTGGFSKESILPKGNSDKLIPRKTKKFYWDTKKYGGFDSPIVAYSILVIADIEKGKSKKLKTVKALVGVTIMEKMTFERDPVAFLERKGYRNVQEENIIKLPKYSLFKLENGRKRLLASARELQKGNEIVLPNHLGTLLYHAKNIHKVDEPKHLDYVDKHKDEFKELLDVVSNFSKKYTLAEGNLEKIKELYAQNNGEDLKELSSSFINLLTFTAIGAPAAFKFFDKNIDRKRYTSTTEILNATLIHQSITGLYETRIDLSKLGGD

SEQ ID NO: 140 - protein, 1336 aa, Streptococcus mutans
MKKPYSIGLDIGTNSVGWAVVTDDYKVPAKKMKVLGNTDKSHIKKNLLGALLFDSGNTAEDRRLKRTARRRYTRRRNRILYLQEIFAEEMSKVDDSFFHRLDESFLTDDDKNFDSHPIFGNKAEEDAYHQKFPTIYHLRKHLADSTEKADLRLVYLALAHMIKFRGHFLIEGELNAENTDVQKLFADFVGVYDRTFDDSHLSEITVDASSILTEKISKSRRLEKLINNYPKEKKNTLFGNLIALSLGLQPNFKTNFKLSEDAKLQFSKDTYEEDLEELLGKIGDDYADLFTLAKNLYDAILLSGILTADDSSTKAPLSASMIKRYAEHHEDLEKLKEFIKANKPELYHDIFKDETKNGYAGYIENGVKQDEFYKYLKNTLSKITGSDYFLDQIEREDFLRKQRTFDNGSIPHQIHLQEMHAILRRQGDYYPFLKENQDRIEKILTFRIPYYVGPLARKNSRFAWAEYHSDEAVTPWNFDQVIDKESSAQAFIEHMTNNDLYLPNEKVLPKHSPLYEKYTVYNELTKIKYVTEIGEAKFFDANLKQEIFDGLFKHERKVTKKKLRTFLDKNFDEFRIVDIQGLDKETETFNASYATYQDLLKVIKDKVFMDNPENAEILENIVLTLTLFEDREMIKQRLAKYADVFDKKVIDQLARRHYTGWGRLSAKLLNGIRDKQSCKTIMDYLIDDAQSNRNLMQLITDDNLTFKDDIVKAQYVDNSDDLHQVVQSLAGSPAIKKGILQSLKIVDELVKVMGKEPEQIVVEMARENQTTAKGRRNSQQRYKRLKEAIKDLNHKILKEHPTDNQALQNNRLFLYYLQNGRDMYTGESLDINRLSDYDIDHVIPQAFIKDNSIDNRVLTSSKANRGKSDDVPSEDVVNRMRPFWNKLLSSGLISQRKYNNLTKKELTLDDKAGFIKRQLVETRQITKHVARMLDERFNKEFDDNNKRIRRVKIVTLKSNLVSSFRKEFELYKVREINDYHHAHDAYLNAVVVKALLVKYPKLEPEFVYGEYPKYNSYRERKATQKMFFYSNIMNMFKSKVKLADDQIVERPMIEVNDETGEIAWDKTKHITTVKKVLSYPQVNIVKKVEEQTGGLFDPKSPLEKLVPLKKALNPEKYGGYQKPTTAYPILLIVDTKQLIPISVMDKKRFEQNPVKFLKDKGYQQIEKNNFVKLPKYTLVDIGNGIKRLWASSKEVHKGNQLVVSKKSQDLLYHAHHLDNDYSNEYVKNHYQQFDILFNEITSFSKKCKLGKEHIQKIEEAYSKERDFASIEELADGFIKLLGFTQLGATSPFSFLGIKLNQKQYTGKKDYLEATLIHQSITGLYETRIDLSKLGGD

SEQ ID NO: 141 - protein, 1345 aa, Streptococcus mutans
MKKPYSIGLDIGTNSVGWSVVTDDYKVPAKKMKVLGNTDKSHIEKNLLGALLFDSGNTAEDRRLKRTARRRYTRRRNRILYLQEIFSEEMGKVDDSFFHRLEDSFLVTEDKRGERHPIFGNLEEEVKYHENFPTIYHLRQYLADNPEKVDLRLVYLALAHIIKFRGHFLIEGKFDTRNNDVQRLFQEFLAVYDNTFENSSLQEQNVQVEEILTDKISKSAKKDRVLKLFPNEKSNGRFAEFLKLIVGNQADFKKHFELEEKAPLQFSKDTYEEELEVLLAQIGDNYAELFLSAKKLYDSILLSGILTVTDVGTKAPLSASMIQRYNEHQMDLAQLKQFIRQKLSDKYNEVFSDVSKDGYAGYIDGKTNQEAFYKYLKGLLNKIEGSGYFLDKIEREDFLRKQRTFDNGSIPHQIHLQEMRAIIRRQAEFYPFLADNQDRIEKLLTFRIPYYVGPLARGKSDFAWLSRKSADKITPWNFDEIVDKESSAEAFINRMTNYDLYLPNQKVLPKHSLLYEKFTVYNELTKVKYKTEQGKTAFFDANMKQEIFDGVFKVYRKVTKDKLMDFLEKEFDEFRIVDLTGLDKENKVFNASYGTYHDLCKILDKDFLDNSKNEKILEDIVLTLTLFEDREMIRKRLENYSDLLTKEQVKKLERRHYTGWGRLSAELIHGIRNKESRKTILDYLIDDGNSNRNFMQLINDDALSFKEEIAKAQVIGETDNLNQVVSDIAGSPAIKKGILQSLKIVDELVKIMGHQPENIVVEMARENQFTNQGRRNSQQRLKGLTDSIKEFGSQILKEHPVENSQLQNDRLFLYYLQNGRDMYTGEELDIDYLSQYDIDHIIPQAFIKDNSIDNRVLTSSKENRGKSDDVPSKDVVRKMKSYWSKLLSAKLITQRKFDNLTKAERGGLTDDDKAGFIKRQLVETRQITKHVARILDERFNTETDENNKKIRQVKIVTLKSNLVSNFRKEFELYKVREINDYHHAHDAYLNAVIGKALLGVYPQLEPEFVYGDYPHFHGHKENKATAKKFFYSNIMNFFKKDDVRIDKNGEIIWKKDEHISNIKKVLSYPQVNIVKKVEEQTGGFSKESILPKGNSDKLIPRKTKKFYWDTKKYGGFDSPIVAYSILVIADIEKGKSKKLKTVKALVGVTIMEKMTFERDPVAFLERKGYRNVQEENIIKLPKYSLFKLENGRKRLLASARELQKGNEIVLPNHLGTLLYHAKNIHKVDEPKHLDYVDKHKDEFKELLDVVSNFSKKYTLAEGNLEKIKELYAQNNGEDLKELASSFINLLTFTAIGAPATFKFFDKNIDRKRYTSTTEILNATLIHQSITGLYETRIDLSKLGGD

SEQ ID NO: 142 - protein, 1345 aa, Streptococcus mutans
MKKPYSIGLDIGTNSVGWAVVTDDYKVPAKKMKVLGNTDKSHIKKNLLGALLFDSGNTAEDRRLKRTARRRYTRRRNRILYLQEIFSEEMGKVDDSFFHRLEDSFLVTEDKRGERHPIFGNLEEEVKYHENFPTIYHLRQYLADNPEKTDLRLVYLALAHIIKFRGHFLIEGKFDTRNNDVQRLFQEFLAVYDNTFENSSLQEQNVQVEEILTDKISKSAKKDRVLKLFPNEKSNGRFAEFLKLIVGNQADFKKHFELEEKAPLQFSKDIYEEELEVLLAQIGDNYAELFLSAKKLYDSILLSGILTVTDVSTKAPLSASMIQRYNEHQMDLAQLKQFIRQKLSDKYNEVFSDVSKDGYAGYIDGKTNQEAFYKYLKGLLNKIEGSGYFLDKIEREDFLRKQRTFDNGSIPHQIHLQEMRAIIRRQAEFYPFLADNQDRIEKILTFRIPYYVGPLARGKSDFAWLSRKSADKITPWNFDEIVDKESSVEAFINRMTNYDLYLPNQKVLPKHSLLYEKFTVYNELTKVKYKTEQGKTAFFDANMKQEIFDGVFKVYRKVTKDKLMDFLEKEFDEFRIVDLTGLDKENKAFNASYGTYHDLRKILDKDFLDNSKNEKILEDIVLTLTLFEDREMIRKRLKNYSDLLTKEQLKKLERRHYTGWGRLSAELIHGIRNKESRKTILDYLIDDGNSNRNFMQLINDDALSFKEEIAKAQVIGETDNLNQVVSDIAGSPAIKKGILQSLKIVDELVKIMGHQPENIVVEMARENQFTNQGRRNSQQRLKGLTDSIKEFGSQILKEHPVENSQLQNDRLFLYYLQNGRDMYTGEELDIDYLSQYDIDHIIPQAFIKDNSIDNRVLTSSKENRGKSDDVPSKNVVRKMKSYWSKLLSAKLITQRKFDNLTKAERGGLTDDDKAGFIKRQLVETRQITKHVARILDERFHTETDENNKKIRQVKIVTLKSNLVSNFRKEFELYKVREINDYHHAHDAYLNAVIGKALLGVYPQLEPEFVYGDYPHFHGHKENKATAKKFFYSNIMNFFKKDDVRTDKNGEIIWKKDEHISNIKKVLSYPQVNIVKKVEEQTGGFSKESILPKGNSDKLIPRKTKKFYWDTKKYGGFDSPIVAYSILVIADIEKGKSKKLKTVKALVGVTIMEKMTFERDPVAFLERKGYRNVQEENIIKLPKYSLFKLENGRKRLLASARELQKGNEIVLPNHLGTLLYHAKNIHKVDEPKHLDYVDKHKDEFKELLDVVSNFSKKYTLAEGNLEKIKELYAQNNGEDLKELASSFINLLTFTAIGAPATFKFFDKNIDRKRYTSTTEILNATLIHQSITGLYETRIDLSKLGGD

SEQ ID NO: 143 - protein, 1345 aa, Streptococcus mutans
MKKPYSIGLDIGTNSVGWAVVTDDYKVSAKKMKVLGNTDKSHIKKNLLGALLFDSGNTAEDRRLKRTARRRYTRRRNRILYLQEIFAEEMSKVDDSFFHRLEDSFLVTEDKRGERHPIFGNLEEEVKYHENFPTIYHLRQYLADNPEKVDLRLVYLALAHIIKFRGHFLIEGKFDTRNNDVQRLFQEFLAVYDNTFENSSLQEQNVQVEEILTDKISKSAKKDRVLKLFPNEKSNGRFAEFLKLIVGNQADFKKHFELEEKAPLQFSKDTYEEELEVLLAQIGDNYAELFLSAKKLYDSILLSGILTVTDVSTKAPLSASMIQRYNEHQMDLAQLKQFIRQKLSDKYNEVFSDVSKDGYAGYIDGKTNQEAFYKYLKGLLNKIEGSGYFLDKIEREDFLRKQRTFDNGSIPHQIHLQEMRAIIRRQAEFYPFLADNQDRIEKILTFRIPYYVGPLARGKSDFAWLSRKSADKITPWNFDEIVDKESSAEAFINRMTNYDLYLPNQKVLPKHSLLYEKFTVYNELTKVKYKTEQGKTAFFDANMKQEIFDGVFKVYRKVTKDKLMDFLEKEFDEFRIVDLTGLDKENKAFNASYGTYHDLRKILDKDFLDNSKNEKILEDIVLTLTLFEDREMIRKRLENYSDLLTKEQVKKLERRHYTGWGRLSAELIHGIRNKESRKTILDYLIDDGNSNRNFMQLINDDALSFKEEIAKAQVIGETDNLNQVVSDIAGSPAIKKGILQSLKIVDELVKIMGHQPENIVVEMARENQFTNQGRRNSQQRLKGLTDSIKEFGSQILKEHPVEHSQLQNDRLFLYYLQNGRDMYTGEELDIDYLSQYDIDHIIPQAFIKDNSIDNRVLTSSKENRGKSDDVPSKNVVRKMKSYWSKLLSAKLITQRKFDNLTKAERGGLTDDDKAGFIKRQLVETRQITKHVARILDERFHTETDENNKKIRQVKIVTLKSNLVSNFRKEFELYKVREINDYHHTHDAYLNAVIGKALLGVYPQLEPEFVYGDYPHFHGHKENKATAKKFFYSNIMNFFKKDDVRTDKNGEIIWKKDEHISNIKKVLSYPQVNIVKKVEEQTGGFSKESILPKGNSDKLIPRKTKKFYWDTKKYGGFDSPIVAYSILVIADIEKGKSKKLKTVKALVGVTIMEKMTFERDPVAFLERKGYRNVQEENIIKLPKYSLFKLENGRKRLLASARELQKGNEIVLPNHLGTLLYHAKNIHKVDEPKHLDYVDKHKDEFKELLDVVSNFSKKYTLAEGNLEKIKELYAQNNGEDLKELASSFINLLTFTAIGAPATFKFFDKNIDRKRYTSTTEILNATLIHQSITGLYETRIDLSKLGGD

SEQ ID NO: 144 - protein, 1345 aa, Streptococcus mutans
MKKPYSIGLDIGTNSVGWAVVTDDYKVPAKKMKVLGNTDKSHIKKNLLGALLFDSGNTAEDRRLKRTARRRYTRRRNRILYLQEIFSEEMGKVDDSFFHRLEDSFLVTEDKRGERHPIFGNLEEEVKYHENFPTIYHLRQYLADNPEKTDLRLVYLALAHIIKFRGHFLIEGKFDTRNNDVQRLFQEFLAVYDNTFENSSLQEQNVQVEEILTDKISKSAKKDRVLKLFPNEKSNGRFAEFLKLIVGNQADFKKHFELEEKAPLQFSKDIYEEELEVLLAQIGDNYAELFLSAKKLYDSILLSGILTVTDVSTKAPLSASMIQRYNEHQMDLAQLKQFIRQKLSDKYNEVFSDVSKDGYAGYIDGKTNQEAFYKYLKGLLNKIEGSGYFLDKIEREDFLRKQRTFDNGSIPHQIHLQEMRAIIRRQAEFYPFLADNQDRIEKILTFRIPYYVGPLARGKSDFAWLSRKSADKITPWNFDEIVDKESSVEAFINRMTNYDLYLPNQKVLPKHSLLYEKFTVYNELTKVKYKTEQGKTAFFDANMKQEIFDGVFKVYRKVTKDKLMDFLEKEFDEFRIVDLTGLDKENKAFNASYGTYHDLRKILDKDFLDNSKNEKILEDIVLTLTLFEDREMIRKRLKNYSDLLTKEQLKKLERRHYTGWGRLSAELIHGIRNKESRKTILDYLIDDGNSNRNFMQLINDDALSFKEEIAKAQVIGETDNLNQVVSDIAGSPAIKKGILQSLKIVDELVKIMGHQPENIVVEMARENQFTNQGRRNSQQRLKGLTDSIKEFGSQILKEHPVENSQLQNDRLFLYYLQNGRDMYTGEELDIDYLSQYDIDHIIPQAFIKDNSIDNRVLTSSKENRGKSDDVPSKDVVRKMKSYWSKLLSAKLITQRKFDNLTKAERGGLTDDDKAGFIKRQLVETRQITKHVARILDERFNTETDENNKKIRQVKIVTLKSNLVSNFRKEFELYKVREINDYHHAHDAYLNAVIGKALLGVYPQLEPEFVYGDYPHFHGHKENKATAKKFFYSNIMNFFKKDDVRTDKNGEIIWKKDEHISNIKKVLSYPQVNIVKKVEEQTGGFSKESILPKGNSYKLIPRKTKKFYWDTKKYGGFDSPIVAYSILVIADIEKGKSKKLKTVKALVGVTIMEKMTFERDPVAFLERKGYRNVQEENIIKLPKYSLFKLENGRKRLLASARELQKGNEIVLPNHLGTLLYHAKNIHKVDEPKHLDYVDKHKDEFKELLDVVSNFSKKYTLAEGNLEKIKELYAQNNGEDLKELASSFINLLTFTAIGAPAAFKFFDKNIDRKRYTSTTEILNATLIHQSITGLYETRIDLSKLGGD

SEQ ID NO: 145 - protein, 1345 aa, Streptococcus mutans
MKKPYSIGLDIGTNSVGWAVVTDDYKVPAKKMKVLGNTDKSHIKKNLLGALLFDSGNTAEDRRLKRTTRRRYTRRRNRILYLQEIFSEEMGKVDDSFFHRLEDSFLVTEDKRGERHPIFGNLEEEVKYHENFPTIYHLRQYLADNPEKTDLRLVYLALAHIIKFRGHFLIEGKFDTRNNDVQRLFQEFLAVYDNTFENSSLQEQNVQVEEILTDKISKSAKKDRVLKLFPNEKSNGCFAEFLKLIVGNQADFKKHFELEEKAPLQFSKDTYEEELEVLLAQIGDNYAELFLSAKKLYDSILLSGILTVTDVSTKAPLSASMIQRYNEHQMDLTQLKQFIRQKLSDKYNEVFSDVSKDGYAGYIDGKTNQEAFYKYLKGLLNKIEGSGYFLDKIEREDFLRKQRTFDNGSIPHQIHLQEMRAIIRRQAEFYPFLADNQDRIEKLLTFRIPYYVGPLASGKSDFAWLSRKSADKITPWNFDEIVDKESSAEAFINRMTNYDLYLPNQKVLPKHSLLYEKFTVYNELTKVKYKTEQGKTAFFDANMKQEIFDGVFKVYRKVTKDKLMDFLEKEFDEFRIVDLTGLDKENKVFNASYGTYHDLCKILDKDFLDNSKNEKILEDIVLTLTLFEDREMIRKRLENYSDLLTKEQVKKLERRHYTGWGRLSAELIHGIRNKESRKTILDYLIDDGNSNRNFMQLINDDALSFKEEIAKAQVIGETDNLNQVVSDIAGSPAIKKGILQSLKIVDELVKIMGHQPENIVVEMARENQFTNQGRRNSQQRLKGLTDSIKEFGSQILKEHPVENSQLQNDRLFLYYLQNGRDMYTGEELDIDYLSQYDIDHIIPQAFIKDNSIDNRVLTSSKENRGKSDDVPSKDVVRKMKSYWSKLLSAKLITQRKFDNLTKAERGGLTDDDKAGFIKRQLVETRQITKHVARILDERFNTETDENNKKIRQVKIVTLKSNLVSNFRKEFELYKVREINDYHHAHDAYLNAVIGKALLGVYPQLEPEFVYGDYPHFHGHKENKATAKKFFYSNIMNFFKKDDVRTDKNGEIIWKKDEHISNIKKVLSYPQVNIVKKVEEQTGGFSKESILPKGNSDKLIPRKTKKFYWDTKKYGGFDSPIVAYSILVIADIEKGKSKKLKTVKALVGVTIMEKMTFERDPVAFLERKGYRNVQEENIIKLPKYSLFKLENGRKRLLASARELQKGNEIVLPNHLGTLLYHAKNIHKVDEPKHLDYVDKHKDEFKELLDVVSNFSKKYTLAEGNLEKIKELYAQNNGEDLKELASSFINLLTFTAIGAPATFKFFDKNIDRKRYTSTTEILNATLIHQSITGLYETRIDLSKLGGD

SEQ ID NO: 146 - protein, 1345 aa, Streptococcus mutans
MKKPYSIGLDIGTNSVGWAVVTDDYKVPAKKMKVLGNTDKSHIKKNLLGALLFDSGNTAEDRRLKRTARRRYTRRRNRILYLQEIFSEEMGKVDDSFFHRLEDSFLVTEDKRGERHPIFGNLEEEVKYHENFPTIYHLRQYLADNPEKTDLRLVYLALAHIIKFRGHFLIEGKFDTRNNDVQRLFQEFLAVYDNTFENSSLQEQNVQVEEILTDKISKSAKKDRVLKLFPNEKSNGRFAEFLKLIVGNQADFKKHFELEEKAPLQFSKDIYEEELEVLLAQIGDNYAELFLSAKKLYDSILLSGILTVTDVSTKAPLSASMIQRYNEHQMDLAQLKQFIRQKLSDKYNEVFSDVSKDGYAGYIDGKTNQEAFYKYLKGLLNKIEGSGYFLDKIEREDFLRKQRTFDNGSIPHQIHLQEMRAIIRRQAEFYPFLADNQDRIEKILTFRIPYYVGPLARGKSDFAWLSRKSADKITPWNFDEIVDKESSAEAFINRMTNYDLYLPNQKVLPKHSLLYEKFTVYNELTKVKYKTEQGKTAFFDANMKQEIFDGVFKVYRKVTKDKLMDFLEKEFDEFRIVDLTGLDKENKAFNASYGTYHDLRKILDKDFLDNSKNEKILEDIVLTLTLFEDREMIRKRLKNYSDLLTKEQLKKLERRHYTGWGRLSAELIHGIRNKESRKTILDYLIDDGNSNRNFMQLINDDALSFKEEIAKAQVIGETDNLNQVVSDIAGSLAIKKGILQSLKIVDELVKIMGHQPENIVVEMARENQFTNQGRRNSQQRLKGLTDSIKEFGSQILKEHPVENSQLQNDRLFLYYLQNGRDMYTGEELDIDYLSQYDIDHIIPQAFIKDNSIDNRVLTSSKENRGKSDDVPSKDVVRKMKSYWSKLLSAKLITQRKFDNLTKGERGGLTDDDKAGFIKRQLVETRQITKHVARILDERFNTETDENNKKIRQVKIVTLKSNLVSNFRKEFELYKVREINDYHHAHDAYLNAVIGKALLGVYPQLEPEFVYGDYPHFHGHKENKATAKKFFYSNIMNFFKKDDVRTDKNGEIIWKKDEYISNIKKVLSYPQVNIVKKVEEQTGGFFKESILPKGDSDKLIPRKTKKFYWDTKKYGGFDSPIVAYSILVIADIEKGKSKKLKTVKALVGVTIMEKMTFERDPVAFLERKGYRNVQEENIIKLPKYSLFKLENGRKRLLASARELQKGNEIVLPNHLGTLLYHAKNIHKVDEPKHLDYVDKHKDEFKELLDVVSNFSKKYTLAEGNLEKIKELYAQNNGEDLKELASSFINLLTFTAIGAPATFKFFDKNIDRKRYTSTTEILNATLIHQSITGLYETRIDLSKLGGD

SEQ ID NO: 147 - protein, 1345 aa, Streptococcus mutans
MKKPYSIGLDIGTNSVGWAVVTDDYKVPAKKMKVLGNTDKSHIKKNLLGALLFDSGNTAEDRRLKRTARRRYTRRRNRILYLQEIFSEEMGKVNDSFFHRLEDSFLVTEDKRGERHPIFGNLEEEVKYHENFPTIYHLRQYLADNPEKVDLRLVYLALAHIIKFRGHFLIEGKFDTRNNDVQRLFQEFLAVYDNTFENSSLQEQNVQVEEILTDKISKSAKKDRVLKLFPNEKSNGRFAEFLKLIVGNQADFKKHFELEEKAPLQFSKDTYEEELEVLLAQIGDNYAELFLSAKKLYDSILLSGILTVTDVSTKAPLSASMIQRYNEHQMDLAQLKQFIRQKLSDKYNEVFSDVSKDGYAGYIDGKTNQEAFYKYLKGLLNKIEGSGYFLDKIEREDFLRKQRTFDNGSIPHQIHLQEMRAIIRRQAEFYPFLADNQDRIEKILTFRIPYYVGPLARGKSDFAWLSRKSADKITPWNFDEIVDKESSAEAFINRMTNYDLYLPNQKVLPKHSLLYEKFTVYNELTKVKYKTEQGKTAFFDANMKQEIFDGVFKVYRKVTKDKLMDFLEKEFDEFRIVDLTGLDKENKVFNASYGTYHDLCKILDKDFLDNSKNEKILEDIVLTLTLFEDREMIRKRLENYSDLLTKEQVKKLERRHYTGWGRLSAELIHGIRNKESRKTILDYLIDDGNSNRNFMQLINDDALSFKEEIAKAQVIGETDNLNQVVSDIAGSPAIKKGILQSLKIVDELVKIMGHQPENIVVEMARENQFTKQGRRNSQQRLKGLTDSIKEFGSQILKEHPVENSQLQNDRLFLYYLQNGRDMYTGEELDIDYLSQYDIDHIIPQAFIKDNSIDNRVLTSSKENRGKSDDVPSKDVVRKMKSYWSKLLSAKLITQRKFDNLTKAERGGLTDDDKAGFIKRQLVETRQITKHVARILDERFYTETDENNKKIRQVKIVTLKSNLVSNFRKEFELYKVREINDYHHAHDAYLNAVIGKALLGVYPQLEPEFVYGDYPHFHGHKENKATAKKFFYSNIMNFFKKDDVRTDKNGEIIWKKDEYISNIKKVLSYPQVNIVKKVEEQTGGFSKESILPKGNSDKLIPRKTKKFYWDTKKYGGFDSPIVAYSILVIADIEKGKSKKLKTVKALVGVTIMEKMTFERDPIAFLERKGYRNVQEENIIKLPKYSLFKLENGRKRLLASARELQKGNEIVLPNHLGTLLYHAKNIHKVDEPKHLDYVDKHKDEFKELLDVVSNFSKKYTLAEGNLEKIKELYAQNNGEDLKELASSFINLLTFTAIGAPAAFKFFDKNIDRKRYTSTTEILNATLIHQSITGLYETRIDLSKLGGD

SEQ ID NO: 148 - protein, 1345 aa, Streptococcus mutans
MKKPYSIGLDIGTNSVGWAVVTDDYKVPAKKMKVLGNTDKSHIKKNLLGALLFDSGNTAEDRRLKRTARRRYTRRRNRILYLQEIFSEEMGKVDDSFFHRLEDSFLVTEDKRGERHPIFGNLEEEVKYHENFPTIYHLRQYLADNPEKTDLRLVYLALAHIIKFGGHFLIEGKFDTRNNDVQRLFQEFLAVYDNTFENSSLQEQNVQVEEILTDKISKSAKKDRVLKLFPNEKSNGRFAEFLKLIVGNQADFKKHFELEEKAPLQFSKDIYEEELEVLLAQIGDNYAELFLSAKKLYDSILLSGILTVTDVSTKAPLSASMIQRYNEHQMDLAQLKQFIRQKLSDKYNEVFSDVSKDGYAGYIDGKTNQEAFYKYLKGLLNKIEGSGYFLDKIEREDFLRKQRTFDNGSIPHQIHLQEMRAIIRRQAEFYPFLADNQDRIEKILTFRIPYYVGPLARGKSDFAWLSRKSADKITPWNFDEIVDKESSVEAFINRMTNYDLYLPNQKVLPKHSLLYEKFTVYNELTKVKYKTEQGKTAFFDANMKQEIFDGVFKVYRKVTKDKLMDFLEKEFDEFRIVDLTGLDKENKAFNASYGTYHDLRKILDKDFLDNSKNEKILEDIVLTLTLFEDREMIRKRLKNYSDLLTKEQLKKLERRHYTGWGRLSAELIHGIRNKESRKTILDYLIDDGNSNRNFMQLINDDALSFKEEIAKAQVIGETDNLNQVVSDIAGSPAIKKGILQSLKIVDELVKIMGHQPENIVVEMARENQFTNQGRRNSQQRLKGLTDSIKEFGSQILKEHPVENSQLQNDRLFLYYLQNGRDMYTGEELDIDYLSQYDIDHIIPQAFIKDNSIDNRVLTSSKENRGKSDDVPSKNVVRKMKSYWSKLLSAKLITQRKFDNLTKAERGGLTDDDKAGFIKRQLVETRQITKHVARILDERFHTETDENNKKIRQVKIVTLKSNLVSNFRKEFELYKVREINDYHHAHDAYLNAVIGKALLGVYPQLEPEFVYGDYPHFHGHKENKATAKKFFYSNIMNFFKKDDVRTDKNGEIIWKKDEHISNIKKVLSYPQVNIVKKVEEQTGGFSKESILPKGNSDKLIPRKTKKFYWDTKKYGGFDSPIVAYSILVIADIEKGKSKKLKTVKALVGVTIMEKMTFERDPVAFLERKGYRNVQEENIIKLPKYSLFKLENGRKRLLASARELQKGNEIVLPNHLGTLLYHAKNIHKVDEPKHLDYVDKHKDEFKELLDVVSNFSKKYTLAEGNLEKIKELYAQNNGEDLKELASSFINLLTFTAIGAPATFKFFDKNIDRKRYTSTTEILNATLIHQSITGLYETRIDLSKLGGD

SEQ ID NO: 149 - protein, 1345 aa, Streptococcus mutans
MKKPYSIGLDIGTNSVGWAVVTDDYKVPAKKMKVLGNTDKSHIKKNLLGALLFDSGNTAEDRRLKRTARRRYTRRRNRILYLQEIFAEEMMQVDESFFQRLDDSFLVEEDKRGSRYPIFGTLKEEKKYHKEFKTIYHLREKLANSTEKADLRLVYLSLAHMIKFRGHFLIEGQLKAENTNVQALFKDFVEVYDKTVEESHLSEMTVDALSILTEKVSKSRRLENLVECYPTEKKNTLFGNLIALSLGLQPNFKTNFQLSEDAKLQFSKDTYEEDLEGLLGEIGDEYADLFASAKNLYDAILLSGILAVDDNTTKAPLSASMVKRYKEHKEELAAFKRFIKEKLPKKYEEIFKDDTKNGYAGYVGADATEEEFYKYVKGILNKVEGADVWLDKIDREDFLRKQRTFDNGSIPHQIHLQEMHAILRRQGEHYPFLKENQDKIEKILTFRIPYYVGPLVRKGSRFAWAEYKADEKITPWNFDDILDKEKSAEKFITRMTLNDLYLPEEKVLPKHSLLYETFTVYNELTKVKYVNEQGEAKFFDANMKQEIFDHVFKENRKVTKDKLLNYLNKEFEEFRIVNLTGLDKENKVFNSSLGTYHDLRKILNKSFLDNKENEQIIEDIIQTLTLFEDREMIRQRLQKYSDIFTKAQLKKLERRHYTGWGRLSYKLINGIRDKQSNKTILGYLIDDGYSNRNFMQLINDDALSFKEEIAKAQVIGEMDGLNQVVSDIAGSPAIKKGILQSLKIVDELVKVMGHNPANIVIEMARENQTTAKGRRSSQKRYKRLEEAIKDLNHKILKEHPTDNQALQNDRLFLYYLQNGRDMYTEDPLDINRLSDYDIDHIIPQAFIKDNSIDNRVLTRSDKNRGKSDDVPSEEVVHKMKPFWSKLLSAKLITQRKFDNLTKAERGGLTDDDKAGFIKRQLVETRQITKHVARILDERFNTETDENNKKIRQVKIVTLKSNLVSNFRKEFELYKVREINDYHHAHDAYLNAVIGKALLGVYPQLEPEFVYGDYPHFHGHKENKATAKKFFYSNIMNFFKKGDVRTDKNGEIIWKKDEHISNIKKVLSYPQVNIVKKVEEQTGGFSKESILPKGNSDKLIPRKTKKFYWDTKKYGGFDSPIVAYSILVIADIEKGKSKKLKTVKALVGVTIMEKMTFERDPVAFLERKGYRNVQEENIIKLPKYSLFKLENGRKRLLASARELQKGNEIVLPNHLETLLYHAKNIHKVDEPKHLDYVDKHKDEFKELLDVVSNFSKKYTLAEGNLEKIKELYAQNNGEDLKELASSFINLLTFTAIGAPAAFKFFDKNIDRKRYTSTTEILNATLIHQSITGLYETRIDLNKLGGD

SEQ ID NO: 150 - protein, 1345 aa, Streptococcus mutans
MKKPYSIGLDIGTNSVGWAVVTDDYKVPAKKMKVLGNTDKSHIKKNLLGALLFDSGNTAEDRRLKRTARRRYTRRRNRILYLQEIFSEEMDKVDDSFFHRLEDSFLVTEDKRGERHPIFGNLEEEVKYHENFPTIYHLRQYLADNPEKVDLRLVYLALAHIIKFRGHFLIEGKFDTRNNDVQRLFQEFLAVYDNTFENSSLQEQNVQVEEILTDKISKSAKKDRVLKLFPNEKSNGRFAEFLKLIVGNQADFKKHFELEEKAPLQFSKDTYEEELEVLLAQIGDNYAELFLSAKKLYDSILLSGILTVTDVSTKAPLSASMIQRYNEHQMDLAQLKQFIRQKLSDKYNEVFSDVSKDGYAGYIDGKTNQEAFYKYLKGLLNKIEGSGYFLDKIEREDFLRKQRTFDNGSIPHQIHLQEMRAIIRRQAEFYPFLADNQDRIEKILTFRIPYYVGPLARGKSDFAWLSRKSADKITPWNFDEIVDKESSAEAFINRMTNYDLYLPNQKVLPKHSLLYEKFTVYNELTKVKYKTEQGKTAFFDANMKQEIFDGVFKVYRKVTKDKLMDFLEKEFDEFRIVDLTGLDKENKVFNASYGTYHDLCKILDKDFLDNSKNEKILEDIVLTLTLFEDREMIRKRLENYSDLLTKEQVKKLERRHYTGWGRLSAELIHGIRNKESRKTILDYLIDDGNSNRNFMQLINDDALSFKEEIAKAQVIGETDNLNQVVSDIAGSPAIKKGILQSLKIVDELVKIMGHQPENIVVEMARENQFTKQGRRNSQQRLKGLTDSIKEFGSQILKEHPVENSQLQNDRLFLYYLQNGRDMYTGEELDIDYLSQYDIDHIIPQAFIKDNSIDNRVLTSSKENRGKSDDVPSKDVVRKMKSYWSKLLSAKLITQRKFDNLTKAERGGLTDDDKAGFIKRQLVETRQITKHVARILDERFYTETDENNKKIRQVKIVTLKSNLVSNFRKEFELYKVREINDYHHAHDAYLNAVIGKALLGVYPQLEPEFVYGDYPHFHGHKENKATAKKFFYSNIMNFFKKDDVRTDKNGEIIWKKDEHISNIKKVLSYPQVNIVKKVEEQTGGFSKESILPKGNSDKLIPRKTKKFYWDTKKYGGFDSPIVAYSILVIADIEKGKSKKLKTVKALVGVTIMEKMTFERDPVAFLERKGYRNVQEENIIKLPKYSLFKLENGRKRLLASARELQKGNEIVLPNHLGTLLYHAKNIHKVDEPKHLDYVDKHKDEFKELLDVVSNFSKKYTLAEGNLEKIKELYAQNNGEDLKELASSFINLLTFTAIGAPATFKFFDKNIDRKRYTSTTEILNATLIHQSITGLYETRIDLSKLGGD

SEQ ID NO: 151 - protein, 1345 aa, Streptococcus mutans
MKKPYSIGLDIGTNSVGWAVVTDDYKVPAKKMKVLGNTDKSHIKKNLLGALLFDSGNTAEDRRLKRTARRRYTRRRNRILYLQEIFSEEMGKVDDSFFHRLEDSFLVTEDKRGERHPIFGNLEEEVKYHENFPTIYHLRQYLADNPEKVDLRLVYLALAHIIKFRGHFLIEGKFDTRNNDVQKLFQEFLAVYDNTFENSSLQEQNVQVEEILTDKISKSAKKDRVLKLFPNEKSNGRFAEFLKLIVGNQADFKKHFELEEKAPLQLSKDTYEEELEVLLAQIGDNYAELFLSAKKLYDSILLSGILTVTDVSTKAPLSASMIQRYNEHQMDLAQLKQFIRQKLSDKYNEVFSDVSKDGYAGYIDGKTNQEAFYKYLKGLLNKIEGSGYFLDKIEREDFLRKQRTFDNGSIPHQIHLQEMRAIIRRQAEFYPFLADNQDRIEKILTFRIPYYVGPLARGKSDFAWLSRKSADKITPWNFDEIVDKESSVEAFINRMTNYDLYLPNQKVLPKHSLLYEKFTVYNELTKVKYKTEQGKTAFFDANMKQEIFDGVFKVYRKVTKDKLMDFLEKEFDEFRIVDLTGLDKENKAFNASYGTYHDLRKILDKDFLDNSKNEKILEDIVLTLTLFEDREMIRKRLENYSDLLTKEQVKKLERRHYTGWGRLSAELIHGIRNKESRKTLLDYLIDDGNSNRNFMQLINDDALSFKEEIAKAQVIGETDNLNQVVSDIAGSPAIKKGILQSLKIVDELVKIMGHQPENIVVEMARENQFTNQGRRNSQQRLKGLTDSIKEFGSQILKEHPVENSQLQNDRLFLYYLQNGRDMYTGEELDIDYLSQYDIDHIIPQAFIKDNSIDNRVLTSSKENRGKSDDVPSKDVVRKMKSYWSKLLSAKLITQRKFDNLTKAERGGLTDDDKAGFIKRQLVETRQITKHVARILDERFNTETDENNKKIRQVKIVTLKSNLVSNFRKEFELYKVREINDYHHAHDAYLNAVIGKALLGVYPQLEPEFVYGDYPHFHGHKENKATAKKFFYSNIMNFFKKDDVRTDKNGEIIWKKDEYISNIKKVLSYPQVNIVKKVEEQTGGFSKESILPKGNSDKLIPRKTKKFYWDTKKYGGFDSPIVAYSILVIADIEKGKSKKLKTVKALVGVTIMEKMTFERDPIAFLERKGYRNVQEENIIKLPKYSLFKLENGRKRLLASARELQKGNEIVLPNHLGTLLYHAKNIHKVDEPKHLDYVDKHKDEFKELLDVVSNFSKKYTLAEGNLEKIKELYAQNNGEDLKELASSFINLLTFTAIGAPATFKFFDKNIDRKRYTSTTEILNATLIHQSITGLYETRIDLSKLGGD

SEQ ID NO: 152 - protein, 1345 aa, Streptococcus mutans
MKKPYSIGLDIGTNSVGWAVVTDDYKVPAKKMKVLGNTDKSHIKKNLLGALLFDSGNTAEDRRLKRTARRRYTRRRNRILYLQEIFSEEMGKVDDSFFHRLEDSFLVTEDKRGERHPIFGNLEEEVKYHENFPTIYHLRQYLADNPEKTDLRLVYLALAHIIKFRGHFLIEGKFDTRNNDVQRLFQEFLAVYDNTFENSSLQEQNVQVEEILTDKISKSAKKDRVLKLFPNEKSNGRFAEFLKLIVGNQADFKKHFELEEKAPLQFSKDIYEEELEVLLAQIGDNYAELFLSAKKLYDSILLSGILTVTDVSTKAPLSASMIQRYNEHQMDLAQLKQFIRQKLSDKYNEVFSDVSKDGYAGYIDGKTNQEAFYKYLKGLLNKIEGSGYFLDKIEREDFLRKQRTFDNGSIPHQIHLQEMRAIIRRQAEFYPFLADNQDRIEKILTFRIPYYVGPLARGKSDFAWLSRKSADKITPWNFDEIVDKESSAEAFINRMTNYDLYLPNQKVLPKHSLLYEKFTVYNELTKVKYKTEQGKTAFFDANMKQEIFDGVFKVYRKVTKDKLMDFLEKEFDEFRIVDLTGLDKENKAFNASYGTYHDLRKILDKDFLDNSKNEKILEDIVLTLTLFEDREMIRKRLKNYSDLLTKEQLKKLERRHYTGWGRLSAELIHGIRNKESRKTILDYLIDDGNSNRNFMQLINDDALSFKEEIAKAQVIGETDNLNQVVSDIAGSLAIKKGILQSLKIVDELVKIMGHQPENIVVEMARENQFTNQGRRNSQQRLKGLTDSIKEFGSQILKEHPVENSQLQNDRLFLYYLQNGRDMYTGEELDIDYLSQYDIDHIIPQAFIKDNSIDNRVLTSSKENRGKSDDVPSKDVVRKMKSYWSKLLSAKLITQRKFDNLTKGERGGLTDDDKAGFIKHQLVETRQITKHVARILDERFNTETDENNKKIRQVKIVTLKSNLVSNFRKEFELYKVREINDYHHAHDAYLNAVIGKALLGVYPQLEPEFVYGDYPHFHGHKENKATAKKFFYSNIMNFFKKDDVRTDKNGEIIWKKDEYISNIKKVLSYPQVNIVKKVEEQTGGFFKESILPKGDSDKLIPRKTKKFYWDTKKYGGFDSPIVAYSILVIADIEKGKSKKLKTVKALVGVTIMEKMTFERDPVAFLERKGYRNVQEENIIKLPKYSLFKLENGRKRLLASARELQKGNEIVLPNHLGTLLYHAKNIHKVDEPKHLDYVDKHKDEFKELLDVVSNFSKKYTLAEGNLEKIKELYAQNNGEDLKELASSFINLLTFTAIGAPATFKFFDKNIDRKRYTSTTEILNATLIHQSITGLYETRIDLSKLGGD

SEQ ID NO: 153 - protein, 1345 aa, Streptococcus mutans
MKKPYSIGLDIGTNSVGWAVVTDDYKVPAKKMKVLGNTDKSHIKKNLLGALLFDSGNTAEDRRLKRTARRRYTRRRNRILYLQEIFSEEMGKVDDSFFHRLEDSFLVTEDKRGERHPIFGNLEEEVKYHENFPTIYHLRQYLADNPEKTDLRLVYLALAHIIKFRGHFLIEGKFDTRNNDVQRLFQEFLAVYDNTFENSSLQEQNVQVEEILTDKISKSAKKDRVLKLFPNEKSNGRFAEFLKLIVGNQADFKKHFELEEKAPLQFSKDIYEEELEVLLAQIGDNYAELFLSAKKLYDSILLSGILTVTDVSTKAPLSASMIQRYNEHQMDLAQLKQFIRQKLSDKYNEVFSDVSKDGYAGYIDGKTNQEAFYKYLKGLLNKIEGSGYFLDKIEREDFLRKQRTFDNGSIPHQIHLQEMRAIIRRQAEFYPFLADNQDRIEKILTFRIPYYVGPLARGKSDFAWLSRKSADKITPWNFDEIVDKESSAEAFINRMTNYDLYLPNQKVLPKHSLLYEKFTVYNELTKVKYKTEQGKTAFFDANMKQEIFDGVFKVYRKVTKDKLMDFLEKEFDEFRIVDLTGLDKENKAFNASYGTYHDLRKILDKDFLDNSKNEKILEDIVLTLTLFEDREMIRKRLENYSDLLTKEQVKKLERRHYTGWGRLSAELIHGIRNKESRKTLLDYLIDDGNSNRNFMQLINDDALSFKEEIAKAQVIGETDNLNQVVSDIAGSPAIKKGILQSLKIVDELVKIMGHQPENIVVEMARENQFTNQGQRNSQQRLKGLTDSIKEFGSQILKEHPVENSQLQNDRLFLYYLQNGRDMYTGEELDIDYLSQYDIDHIIPQAFIKDNSIDNRVLTSSKENRGKSDDVPSKDVVRKMKSYWSKLLSAKLITQRKFDNLTKAERGGLTDDDKAGFIKRQLVETRQITKHVARILDERFNTETDENNKKIRQVKIVTLKSNLVSNFRKEFELYKVREINDYHHAHDAYLNAVIGKALLGVYPQLEPEFVYGDYPHFHGHKENKATAKKFFYSNIMNFFKKDDVRTDKNGEIIWKKDEYISNIKKVLSYPQVNIVKKVEEQTGGFSKESILPKGDSDKLIPRKTKKFYWDTKKYGGFDSPIVAYSILVIADIEKGKSKKLKTVKALVGVTIMEKMTFERDPVAFLERKGYRNVQEENIIKLPKYSLFKLENGRKRLLASARELQKGNEIVLPDHLGTLLYHAKNIHKVDEPKHLDYVDKHKDEFKELLDVVSNFSKKYTLAEGNLEKIKELYAQNNGEDLKELASSFINLLTFTAIGAPATFKFFDKNIDRKRYTSTTEILNATLIHQSITGLYETRIDLSKLGGD

SEQ ID NO: 154 - protein, 1345 aa, Streptococcus mutans
MKKPYSIGLDIGTNSVGWAVVTDDYKVPAKKMKVLGNTDKSHIKKNLLGALLFDSGNTAADRRLKRTARRRYTRRRNRILYLQEIFAEEMSKVDDSFFHRLEDSFLVTEDKRGERHPIFGNLEEEVKYHENFPTIYHLRQYLADNPEKVDLRLVYLALAHIIKFRGHFLIEGKFDTRNNDVQRLFQEFLAVYDNTFENSSLQEQNVQVEEILTDKISKSAKKDRVLKLFPNEKSNGRFAEFLKLIVGNQADFKKHFELEEKAPLQFSKDTYEEELEVLLAQIGDNYAELFLSAKKLYDSILLSGILTVTDVSTKAPLSASMIQRYNEHQMDLAQLKQFIRQKLSDKYNEVFSDVSKDGYAGYIDGKTNQEAFYKYLKGLLNKIEGSGYFLDKIEREDFLRKQRTFDNGSIPHQIHLQEMRAIIRRQAEFYPFLADNQDRIEKILTFRIPYYVGPLARGKSDFAWLSRKSADKITPWNFDEIVDKESSAEAFINRMTNYDLYLPNQKVLPKHSLLYEKFTVYNELTKVKYKTEQGKTAFFDANMKQEIFDGVFKVYRKVTKDKLMDFLEKEFDEFRIVDLTGLDKENKAFNASYGTYHDLRKILDKDFLDNSKNEKILEDIVLTLTLFEDREMIRKRLENYSDLLTKEQVKKLERRHYTGWGRLSAELIHGIRNKESRKTILDYLIDDGNSNRNFMQLINDDALSFKEEIAKAQVIGETDNLNQVVSDIAGSPAIKKGILQSLKIVDELVKIMGHQPENIVVEMARENQFTNQGRRNSQQRLKGLTDSIKEFGSQILKEHPVKHSQLQNDRLFLYYLQNGRDMYTGEELDIDYLSQYDIDHIIPQAFIKDNSIDNRVLTSSKENRGKSDDVPSKNVVRKMKSYWSKLLSAKLITQRKFDNLTKAERGGLTDDDKAGFIKRQLVETRQITKHVARILDERFHTETDENNKKIRQVKIVTLKSNLVSNFRKEFELYKVREINDYHHAHDAYLNAVIGKALLGVYPQLEPEFVYGDYPHFHGHKENKATAKKFFYSNIMNFFKKDDVRTDKNGEIIWKKDEHISNIKKVLSYPQVNIVKKVEEQTGGFSKESILPKGNSDKLIPRKTKKFYWDTKKYGGFDSPIVAYSILVIADIEKGKSKKLKTVKALVGVTIMEKMTFERDPVAFLERKGYRNVQEENIIKLPKYSLFKLENGRKRLLASARELQKGNEIVLPNHLGTLLYHAKNIHKVDEPKHLDYVDKHKDEFKELLDVVSNFSKKYTLAEGNLEKIKELYAQNNGEDLKELASSFINLLTFTAIGAPATFKFFDKNIDRKRYTSTTEILNATLIHQSITGLYETRIDLSKLGGD

SEQ ID NO: 155 - protein, 1345 aa, Streptococcus mutans
MKKPYSIGLDIGTNSVGWAVVTDDYKVPDKKMKVLGNTDKSHIKKNLLGALLFDSGNTAEDRRLKRTARRRYTRRRNRILYLQEIFSEEMGKVDDSFFHRLEDSFLVTEDKRGERHPIFGNLEEEVKYHENFPTIYHLRQYLADNPEKTDLRLVYLALAHIIKFRGHFLIEGKFDTRNNDVQRLFQEFLAVYDNTFENSSLQEQNVQVEEILTDKISKSAKKDRVLKLFPNEKSNGRFAEFLKLIVGNQADFKKHFELEEKAPLQFSKDIYEEELEVLLAQIGDNYAELFLSAKKLYDSILLSGILTVTDVSTKAPLSASMIQRYNEHQMDLAQLKQFIRQKLSDKYNEVFSDVSKDGYAGYIDGKTNQEAFYKYLKGLLNKIEGSGYFLDKIEREDFLRKQRTFDNGSIPHQIHLQEMRAIIRRQAEFYPFLADNQDRIEKILTFRIPYYVGPLARGKSDFAWLSRKSADKITPWNFDEIVDKESSVEAFINRMTNYDLYLPNQKVLPKHSLLYEKFTVYNELTKVKYKTEQGKTAFFDANMKQEIFDGVFKVYRKVTKDKLMDFLEKEFDEFRIVDLTGLDKENKAFNASYGTYHDLRKILDKDFLDNSKNEKILEDIVLTLTLFEDREMIRKRLKNYSDLLTKEQLKKLERRHYTGWGRLSAELIHGIRNKESRKTILDYLIDDGNSNRNFMQLINDDALSFKEEIAKAQVIGETDNLNQVVSDIAGSPAIKKGILQSLKIVDELVKIMGHQPENIVVEMARENQFTNQGRRNSQQRLKGLTDSIKEFGSQILKEHPVENSQLQNDRLFLYYLQNGRDMYTGEELDIDYLSQYDIDHIIPQAFIKDNSIDNRVLTSSKENRGKSDDVPSKDVVRKMKSYWSKLLSAKLITQRKFDNLTKAERGGLTDDDKAGFIKRQLVETRQITKHVARILDERFYTETDENNKKIRQVKIVTLKSNLVSNFRKEFELYKVREINDYHHAHDAYLNAVIGKALLGVYPQLEPEFVYGDYPHFHGHKENKATAKKFFYSNIMNFFKKDDVRTDKNGEIIWKKDEHISNIKKVLSYPQVNIVKKVEEQTGGFSKESILPKGNSDKLIPRKTKKFYWDTKKYGGFDSPIVAYSILVIADIEKGKSKKLKTVKALVGVTIMEKMTFERDPVAFLERKGYRNVQEENIIKLPKYSLFKLENGRKRLLASARELQKGNEIVLPNHLGTLLYHAKNIHKVDEPKHLDYVDKHKDEFKELLDVVSNFSKKYTLAEGNLEKIKELYAQNNGEDLKELASSFINLLTFTAIGAPATFKFFDKNIDRKRYTSTTEILNATLIHQSITGLYETRIDLSKLGGD

SEQ ID NO: 156 - protein, 1345 aa, Streptococcus mutans
MKKPYSIGLDIGTNSVGWAVVTDDYKVPAKKMKVLGNTDKSHIKKNLLGALLFDSGNTAADRRLKRTARRRYTRRRNRILYLQEIFAEEMSKVDDSFFHRLEDSFLVTEDKRGERHPIFGNLEEEVKYHENFPTIYHLRQYLADNPEKVDLRLVYLALAHIIKFRGHFLIEGKFDTRNNDVQRLFQEFLAVYDNTFENSSLQEQNVQVEEILTDKISKSAKKDRVLKLFPNEKSNGRFAEFLKLIVGNQADFKKHFELEEKAPLQFSKDTYEEELEVLLAQIGDNYAELFLSAKKLYDSILLSGILTVTDVSTKAPLSASMIQRYNEHQMDLAQLKQFIRQKLSDKYNEVFSDVSKDGYAGYIDGKTNQEAFYKYLKGLLNKIEGSGYFLDKIEREDFLRKQRTFDNGSIPHQIHLQEMRAIIRRQAEFYPFLADNQDRIEKILTFRIPYYVGPLARGKSDFAWLSRKSADKITPWNFDEIVDKESSAEAFINRMTNYDLYLPNQKVLPKHSLLYEKFTVYNELTKVKYKTEQGKTAFFDANMKQEIFDGVFKVYRKVTKDKLMDFLEKEFDEFRIVDLTGLDKENKAFNASYGTYHDLRKILDKDFLDNSKNEKILEDIVLTLTLFEDREMIRKRLENYSDLLTKEQVKKLERRHYTGWGRLSAELIHGIRNKESRKTILDYLIDDGNSNRNFMQLINDDALSFKEEIAKAQVIGETDNLNQVVSDIAGSPAIKKGILQSLKIVDELVKIMGHQPENIVVEMARENQFTNQGRRNSQQRLKGLTDSIKEFGSQILKEHPVENSQLQNDRLFLYYLQNGRDMYTGEELDIDYLSQYDIDHIIPQAFIKDNSIDNRVLTSSKENRGKSDDVPSKNVVRKMKSYWSKLLSAKLITQRKFDNLTKAERGGLTDDDKAGFIKRQLVETRQITKHVARILDERFHTETDENNKKIRQVKIVTLKSNLVSNFRKEFELYKVREINDYHHAHDAYLNAVIGKALLGVYPQLEPEFVYGDYPHFHGHKENKATAKKFFYSNIMNFFKKDDVRTDKNGEIIWKKDEHISNIKKVLSYPQVNIVKKVEEQTGGFSKESILPKGNSDKLIPRKTKKFYWDTKKYGGFDSPIVAYSILVIADIEKGKSKKLKTVKALVGVTIMEKMTFERDPVAFLERKGYRNVQEENIIKLPKYSLFKLENGRKRLLASARELQKGNEIVLPNHLGTLLYHAKNIHKVDEPKHLDYVDKHKDEFKELLDVVSNFSKKYTLAEGNLEKIKELYAQNNGEDLKELASSFINLLTFTAIGAPATFKFFDKNIDRKRYTSTTEILNATLIHQSITGLYETRIDLSKLGGD

SEQ ID NO: 157 - protein, 1345 aa, Streptococcus mutans
MKKPYSIGLDIGTNSVGWAVVTDDYKVPAKKMKVLGNTDKSHIEKNLLGALLFDSGNTAEDRRLKRTARRRYTRRRNRILYLQEIFSEEMGKVDDSFFHRLEDSFLVTEDKRGERHPIFGNLEEEVKYHENFPTIYHLRQYLADNPEKVDLRLVYLALAHIIKFRGHFLIEGKFDTRNNDVQRLFQEFLAVYDNTFENSSLQEQNVQVEEILTDKISKSAKKDRVLKLFPNEKSNGRFAEFLKLIIGNQADFKKHFELEEKAPLQFSKDTYEEELEVLLAQIGDNYAELFLSAKKLYDSILLSGILTVTDVGTQAPLSASMIQRYNEHQMDLAQLKQFIRQKLSDKYNEVFSDVSKDGYAGYIDGKTNQEAFYKYLKGLLNKIEGSGYFLDKIEREDFLRKQRTFDNGSIPHQIHLQEMRAIIRRQAEFYPFLADNQDRIEKLLTFRIPYYVGPLARGKSDFAWLSRKSADKITPWNFDEIVDKESSAEAFINRMTNYDLYLPNQKVLPKHSLLYEKFTVYNELTKVKYKTEQGKTAFFDANMKQEIFDGVFKVYRKVTKDKLMDFLEKEFDEFRIVDLTGLDKENKVFNASYGTYHDLCKILDKDFLDNSKNEKILEDIVLTLTLFEDREMIRKRLENYSDLLTKEQVKKLERRHYTGWGRLSAELIHGIRNKESRKTILDYLIDDGNSNRNFMQLINDDALSFKEEIAKAQVIGETDNLNQVVSDIAGSPAIKKGILQSLKIVDELVKIMGHQPENIVVEMARENQFTNQGRRNSQQRLKGLTDSIKEFGSQILKEHPVENSQLQNDRLFLYYLQNGRDMYTGEELDIDYLSQYDIDHIIPQAFIKDNSIDNRVLTSSKENRGKSDDVPSKDVVRKMKSYWSKLLSAKLITQRKFDNLTKAERGGLTDDDKAGFIKRQLVETRQITKHVARILDERFHTETDENNKKIRQVKIVTLKSNLVSNFRKEFELYKVREINDYHHAHDAYLNAVIGKALLGVYPQLEPEFVYGDYPHFHGHKENKATAKKFFYSNIMNFFKKDDVRTDKNGEIIWKKDEHISNIKKVLSYPQVNIVKKVEEQTGGFSKESILPKGNSDKLIPRKTKKFYWDTKKYGGFDSPIVAYSILVIADIEKGKSKKLKTVKALVGVTIMEKMTFERDPVAFLERKGYRNVQEENIIKLPKYSLFKLENGRKRLLASARELQKGNEIVLPNHLGTLLYHAKNIHKVDEPKHLDYVDKHKDEFKELLDVVSNFSKKYTLAEGNLEKIKELYAQNNGEDLKELASSFINLLTFTAIGAPATFKFFDKNIDRKRYTSTTEILNATLIHQSITGLYETRIDLNKLGGD

SEQ ID NO: 158 - protein, 1345 aa, Streptococcus mutans
MKKPYSIGLDIGTNSVGWAVVTDDYKVPAKKMKVLGNTDKSHIKKNLLGALLFDSGNTAEDRRLKRTARRRYTRRRNRILYLQEIFSEEMGKVDDSFFHRLEDSFLVTEDKRGERHPIFGNLEEEVKYHENFPTIYHLRQYLADNPEKVDLRLVYLALAHIIKFRGHFLIEGKFDTRNNDVQKLFQEFLAVYDNTFENSSLQEQNVQVEEILTDKISKSAKKDRVLKLFPNEKSNGRFAEFLKLIVGNQADFKKHFELEEKAPLQLSKDTYEEELEVLLAQIGDNYAELFLSAKKLYDSILLSGILTVTDVSTKAPLSASMIQRYNEHQMDLAQLKQFIRQKLSDKYNEVFSDVSKDGYAGYIDGKTNQEAFYKYLKGLLNKIEGSGYFLDKIEREDFLRKQRTFDNGSIPHQIHLQEMRAIIRRQAEFYPFLADNQDRIEKILTFRIPYYVGPLARGKSDFAWLSRKSADKITPWNFDEIVDKESSVEAFINRMTNYDLYLPNQKVLPKHSLLYEKFTVYNELTKVKYKTEQGKTAFFDANMKQEIFDGVFKVYRKVTKDKLMDFLEKEFDEFRIVDLTGLDKENKAFNASYGTYHDLRKILDKDFLDNSKNEKILEDIVLTLTLFEDREMIRKRLENYSDLLTKEQVKKLERRHYTGWGRLSAELIHGIRNKESRKTLLDYLIDDGNSNRNFMQLINDDALSFKEEIAKAQVIGETDNLNQVVSDIAGSPAIKKGILQSLKIVDELVKIMGHQPENIVVEMARENQFTNQGRRNSQQRLKGLTDSIKEFGSQILKEHPVENSQLQNDRLFLYYLQNGRDMYTGEELDIDYLSQYDIDHIIPQAFIKDNSIDNRVLTSSKENRGKSDDVPSKDVVRKMKSYWSKLLSAKLITQRKFDNLTKAERGGLTDDDKAGFIKRQLVETRQITKHVARILDERFNTETDENNKKIRQVKIVTLKSNLVSNFRKEFELYKVREINDYHHAHDAYLNAVIGKALLGVYPQLEPEFVYGDYPHFHGHKENKATAKKFFYSNIMNFFKKDDVRTDKNGEIIWKKDEYISNIKKVLSYPQVNIVKKVEEQTGGFSKESILPKGNSDKLIPRKTKKFYWDTKKYGGFDSPIVAYSILVIADIEKGKSKKLKTVKALVGVTIMEKMTFERDPIAFLERKGYRNVQEENIIKLPKYSLFKLENGRKRLLASARELQKGNEIVLPNHLGTLLYHAKNIHKVDEPKHLDYVDKHKDEFKELLDVVSNFSKKYTLAEGNLEKIKELYAQNNGEDLKELASSFINLLTFTAIGAPAAFKFFDKNIDRKRYTSTTEILNATLIHQSITGLYETRIDLSKLGGD

SEQ ID NO: 159 - protein, 1345 aa, Streptococcus mutans
MKKPYSIGLDIGTNSVGWAVVTDDYKVPAKKMKVLGNTDKSHIKKNLLGALLFDSGNTAEDRRLKRTARRRYTRRRNRILYLQEIFSEEMGKVDDSFFHRLEDSFLVTEDKRGECHPIFGNLEEEVKYHENFPTIYHLRQYLADNPEKTDLRLVYLALAHIIKFRGHFLIEGKFDTRNNDVQRLFQEFLAVYDNTFENSSLQEQNVQVEEILTDKISKSAKKDRVLKLFPNEKSNGRFAEFLKLIVGNQADFKKHFELEEKAPLQFSKDTYEEELEVLLAQIGDNYAELFLSAKKLYDSILLSGILTVTDVSTKAPLSASMIQRYNEHQMDLTQLKQFIRQKLSDKYNEVFSDVSKDGYAGYIDGKTNQEAFYKYLKGLLNKIEGNGYFLDKIEREDFLRKQRTFDNGSIPHQIHLQEMRAIIRRQAEFYPFLADNQDRIEKILTFRIPYYVGPLARGKSDFAWLSRKSADKITPWNFDEIVDKESSAEAFINRMTNYDLYLPNQKVLPKHSLLYEKFTVYNELTKVKYKTEQGKTAFFDANMKQEIFDGVFKVYRKVTKDKLMDFLEKEFDEFRIVDLTGLDKENKAFNASYGTYHDLRKILDKDFLDNSKNEKILEDIVLTLTLFEDREMIRKRLENYSDLLTKEQVKKLERRHYTGWGRLSAELIHGIRNKESRKTLLDYLIDDGNSNRNFMQLINDDALSFKEEIAKAQVIGETDNLNQVVSDIAGSPAIKKGILQSLKIVDELVKIMGHQPENIVVEMARENQFTNQGRRNSQQRLKGLTDSIKEFGSQILKEHPVENSQLQNDRLFLYYLQNGRDMYTGEELDIDYLSQYDIDHIIPQAFIKDNSIDNRVLTSSKENRGKSDDVPSKDVVRKMKPYWSKLLSAKLITQRKFDNLTKAERGGLTDDDKAGFIKRQLVETRQITKHVARILDERFNTETDENNKKIRQVKIVTLKSNLVSNFRKEFELYKVREINDYHHAHDAYLNAVIGKALLGVYPQLEPEFVYGDYPHFHGHEENKATAKKFFYSNIMNFFKKDDVRTDKNGEIIWKKDEHISNIKKVLSYPQVNIVKKVEEQTGGFSKESILPKGNSDKLIPRKTKKFYWDTKKYGGFDSPIVAYSILVIADIEKGKSKKLKTVKALVGVTIMEKMTFERDPVAFLERKGYRNVQEENIIKLPKYSLFKLENGRKRLLASARELQKGNEIVLPNHLGTLLYHAKNIHKVDEPKHLDYVDKHKDEFKELLDVVSNFSKKYTLAEGNLEKIKELYAQNNGEDLKELSSSFINLLTFTAIGAPAAFKFFDKNIDRKRYTSTTEILNATLIHQSITGLYETRIDLSKLGGD

SEQ ID NO: 160 - protein, 1345 aa, Streptococcus mutans
MKKPYSIGLDIGTNSVGWAVVTDDYKVPAKKMKVLGNTDKSHIEKNLLGALLFDSGNTAEDRRLKRTARRRYTRRRNRILYLQEIFSEEMGKVDDSFFHRLEDSFLVTEDKRGERHPIFGNLEEEVKYHENFPTIYHLRQYLADNPEKVDLRLVYLALAHIIKFRGHFLIEGKFDTRNNDVQRLFQEFLAVYDNTFENSSLQEQNVQVEEILTDKISKSAKKDRVLKLFPNEKSNGRFAEFLKLIVGNQADFKKHFELEEKVPLQFSKDTYEEELEVLLAQIGDNYAELFLSAKKLYDSILLSGILTVTDVGTKAPLSASMIQRYNEHQMDLAQLKQFIRQKLSDKYNEVFSDVSKDGYAGYIDGKTNQEAFYKYLKGLLNKIEGSGYFLDKIEREDFLRKQRTFDNGSIPHQIHLQEMRAIIRRQAEFYPFLADNQDRIEKLLTFRIPYYVGPLARGKSDFAWLSRKSADKITPWNFDEIVDKESSAEAFINRMTNYDLYLPNQKVLPKHSLLYEKFTVYNELTKVKYKTEQGKTAFFDANMKQEIFDGVFKVYRKVTKDKLMDFLEKEFDEFRIVDLTGLDKENKVFNASYGTYHDLCKILDKDFLDNSKNEKILEDIVLTLTLFEDREMIRKRLENYSDLLTKEQVKKLERRHYTGWGRLSAELIHGIRNKESRKTILDYLIDDGNSNRNFMQLINDDALSFKEEIAKAQVIGETDNLNQVVSDIAGSPAIKKGILQSLKIVDELVKIMGHQPENIVVEMARENQFTNQGRRNSQQRLKGLTDSIKEFGSQILKEHPVENSQLQNDRLFLYYLQNGRDMYTGEELDIDYLSQYDIDHIIPQAFIKDNSIDNRVLTSSKENRGKSDDVPSKDVVRKMKSYWSKLLSAKLITQRKFDNLTKAERGGLTDDDKAGFIKRQLVETRQITKHVARILDERFNTETDENNKKIRQVKIVTLKSNLVSNFRKEFELYKVREINDYHHAHDAYLNAVIGKALLGVYPQLEPEFVYGDYPHFHGHKENKATAKKFFYSNIMNFFKKDDVRTDKNGEIIWKKDEHISNIKKVLSYPQVNIVKKVEEQTGGFSKESILPKGNSDKLIPRKTKKFYWDTKKYGGFDSPIVAYSILVIADIEKGKSKKLKTVKALVGVTIMEKMTFERDPVAFLERKGYRNVQEENIIKLPKYSLFKLENGRKRLLASARELQKGNEIVLPNHLGTLLYHAKNIHKVDEPKHLDYVDKHKDEFKELLDVVSNFSKKYTLAEGNLEKIKELYAQNNGEDLKELASSFINLLTFTAIGAPATFKFFDKNIDRKRYTSTTEILNATLIHQSITGLYETRIDLNKLGGD

SEQ ID NO: 161 - protein, 1345 aa, Streptococcus mutans
MKKPYSIGLDIGTNSVGWAVVTDDYKVPAKKMKVLGNTDKSHIKKNLLGALLFDSGNTAEDRRLKRTARRRYTRRRNRILYLQEIFSEEMGKVDDSFFHRLEDSFLVTEDKRGERHPIFGNLEEEVKYHENFPTIYHLRQYLADNPEKTDLRLVYLALAHIIKFRGHFLIEGKFDTRNNDVQRLFQEFLAVYDNTFENSSLQEQNVQVEEILTDKISKSAKKDRVLKLFPNEKSNGRFAEFLKLIVGNQADFKKHFELEEKAPLQFSKDIYEEELEVLLAQIGDNYAELFLSAKKLYDSILLSGILTVTDVSTKAPLSASMIQRYNEHQMDLAQLKQFIRQKLSDKYNEVFSDVSKDGYAGYIDGKTNQEAFYKYLKGLLNKIEGSGYFLDKIEREDFLRKQRTFDNGSIPHQIHLQEMRAIIRRQAEFYPFLADNQDRIEKILTFRIPYYVGPLARGKSDFAWLSRKSADKITPWNFDEIVDKESSAEAFINRMTNYDLYLPNQKVLPKHSLLYEKFTVYNELTKVKYKTEQGKTAFFDANMKQEIFDGVFKVYRKVTKDKLMDFLEKEFDEFRIVDLTGLDKENKAFNASYGTYHDLRKILDKDFLDNSKNEKILEDIVLTLTLFEDREMIRKRLKNYSDLLTKEQLKKLERRHYTGWGRLSAELIHGIRNKESRKTILDYLIDDGNSNRNFMQLINDDALSFKEEIAKAQVIGETDNLNQVVSDIAGSLAIKKGILQNLKIVDELVKIMGHQPENIVVEMARENQFTNQGRRNSQQRLKGLTDSIKEFGSQILKEHPVENSQLQNDRLFLYYLQNGRDMYTGEELDIDYLSQYDIDHIIPQAFIKDNSIDNRVLTSSKENRGKSDDVPSKDVVRKMKSYWSKLLSAKLITQRKFDNLTKGERGGLTDDDKAGFIKRQLVETRQITKHVARILDERFNTETDENNKKIRQVKIVTLKSNLVSNFRKEFELYKVREINDYHHAHDAYLNAVIGKALLGVYPQLEPEFVYGDYPHFHGHKENKATAKKFFYSNIMNFFKKDDVRTDKNGEIIWKKDEYISNIKKVLSYPQVNIVKKVEEQTGGFFKESILPKGDSDKLIPRKTKKFYWDTKKYGGFDSPIVAYSILVIADIEKGKSKKLKTVKALVGVTIMEKMTFERDPVAFLERKGYRNVQEENIIKLPKYSLFKLENGRKRLLASARELQKGNEIVLPNHLGTLLYHAKNIHKVDEPKHLDYVDKHKDEFKELLDVVSNFSKKYTLAEGNLEKIKELYAQNNGEDLKELASSFINLLTFTAIGAPATFKFFDKNIDRKRYTSTTEILNATLIHQSITGLYETRIDLSKLGGD

SEQ ID NO: 162 - protein, 1345 aa, Streptococcus mutans
MKKPYSIGLDIGTNSVGWAVVTDDYKVPAKKMKVLGNTDKSHIEKNLLGALLFDSGNTAEDRRLKRTARRRYTRRRNRILYLQEIFSEEMGKVDDSFFHRLEDSFLVTEDKRGERHPIFGNLEEEVKYHENFPTIYHLRQYLADNPEKVDLRLVYLALAHIIKFRGHFLIEGKFDTRNNDVQRLFQEFLAVYDNTFENSSLQEQNVQVEEILTDKISKSAKKDRVLKLFPNEKSNGRFAEFLKLIVGNQADFKKHFELEEKAPLQFSKDTYEEELEVLLAQIGDNYAELFLSAKKLYDSILLSGILTVTDVGTKAPLSASMIQRYNEHQMDLAQLKQFIRQKLSDKYNEVFSDVSKDGYAGYIDGKTNQEAFYKYLKGLLNKIEGSGYFLDKIEREDFLRKQRTFDNGSIPHQIHLQEMRAIIRRQAEFYPFLADNQDRIEKLLTFRIPYYVGPLARGKSDFAWLSRKSADKITPWNFDEIVDKESSAEAFINRMTNYDLYLPNQKVLPKHSLLYEKFTVYNELTKVKYKTEQGKTAFFDANMKQEIFDGVFKVYRKVTKDKLMDFLEKEFDEFRIVDLTGLDKENKVFNASYGTYHDLCKILDKDFLDNSKNEKILEDIVLTLTLFEDREMIRKRLENYSDLLTKEQVKKLERRHYTGWGRLSAELIHGIRNKESRKTILDYLIDDGNSNRNFMQLINDDALSFKEEIAKAQVIGETDNLNQVVSDIAGSPAIKKGILQSLKIVDELVKIMGHQPENIVVEMARENQFTNQGRRNSQQRLKGLTDSIKEFGSQILKEHPVENSQLQNDRLFLYYLQNGRDMYTGEELDIDYLSQYDIDHIIPQAFIKDNSIDNRVLTSSKENRGKSDDVPSKDVVRKMKSYWSKLLSAKLITQRKFDNLTKAERGGLTDDDKAGFIKRQLVETRQITKHVARILDERFNTETDENNKKIRQVKIVTLKSNLVSNFRKEFELYKVREINDYHHAHDAYLNAVIGKALLGVYPQLEPEFVYGDYPHFHGHKENKATAKKFFYSNIMNFFKKDDVRTDKNGEIIWKKDEHISNIKKVLSYPQVNIVKKVEEQTGGFSKESILPKGNSDKLIPRKTKKFYWDTKKYGGFDSPIVAYSILVIADIEKSKSKKLKTVKALVGVTIMEKMTFERDPVAFLERKGYRNVQEENIIKLPKYSLFKLENGRKRLLASARELQKGNEIVLPNHLGTLLYHAKNIHKVDEPKHLDYVDKHKDEFKELLDVVSNFSKKYTLAEGNLEKIKELYAQNNGEDLKELASSFINLLTFTAIGAPATFKFFDKNIDRKRYTSTTEILNATLIHQSITGLYETRIDLNKLGGD

SEQ ID NO: 163 - protein, 1336 aa, Streptococcus mutans
MKKPYSIGLDIGTNSVGWAVVTDDYKVPAKKMKVLGNTDKSHIKKNLLGALLFDSGNTAEDRRLKRTARRRYTRRRNRILYLQEIFAEEMSKVDDSFFHRLDESFLTDDDKNFDSHPIFGNKAEEDAYHQKFPTIYHLRKHLADSTEKADLRLVYLALAHMIKFRGHFLIEGELNAENTDVQKLFADFVGVYDRTFDDSHLSEITVDASSILTEKISKSRRLEKLINNYPKEKKNTLFGNLIALSLGLQPNFKTNFKLSEDAKLQFSKDTYEEDLEELLGKIGDDYADLFTLAKNLYDAILLSGILTADDSSTKAPLSASMIKRYAEHHEDLEKLKEFIKANKPELYHDIFKDETKNGYAGYIENGVKQDEFYKYLKNTLSKITGSDYFLDQIEREDFLRKQRTFDNGSIPHQIHLQEMHAILRRQGDYYPFLKENQDRIEKILTFRIPYYVGPLARKNSRFAWAEYHSDEAVTPWNFDQVIDKESSAQAFIEHMTNNDLYLPNEKVLPKHSPLYEKYTVYNELTKIKYVTEIGEAKFFDANLKQEIFDGLFKHERKVTKKKLRTFLDKNFDEFRIVDIQGLDKETETFNASYATYQDLLKVIKDKVFMDNPENAEILENIVLTLTLFEDREMIKQRLAKYADVFDKKVIDQLARRHYTGWGRLSAKLLNGIRDKQSCKTIMDYLIDDAQSNRNLMQLITDDNLTFKDDIVKAQYVDNSDDLHQVVQSLAGSPAIKKGILQSLKIVDELVKVMGKEPEQIVVEMARENQTTAKGRRNSQQRYKRLKEAIKDLNHKILKEHPTDNQALQNNRLFLYYLQNGRDMYTGESLDINRLSDYDIDHVIPQAFIKDNSIDNRVLTSSKANRGKSDDVPSEDVVNRMRPFWNKLLSSGLISQRKYNNLTKKELTLDDKAGFIKRQLVETRQITKHVARMLDERFNKEFDDNNKRIRRVKIVTLKSNLVSSFRKEFELYKVREINDYHHAHDAYLNAVVVKALLVKYPKLEPEFVYGEYLKYNSYRERKATQKMFFYSNIMNMFKSKVKLADDQIVERPMIEVNDETGEIAWDKTKHITTVKKVLSYPQVNIVKKVEEQTGGLFDPKSPLEKLVPLKKALNPEKYGGYQKPTTAYPILLIVDTKQLIPISVMDKKRFEQNPVKFLKDKGYQQIEKNNFVKLPKYTLVDIGNGIKRLWASSKEVHKGNQLVVSKKSQDLLYHAHHLDNDYSNEYVKNHYQQFDILFNEITSFSKKCKLGKEHIQKIEEAYSKERDFASIEELADGFIKLLGFTQLGATSPFSFLGIKLNQKQYTGKKDYLEATLIHQSITGLYETRIDLSKLGGD

SEQ ID NO: 164 - protein, 1345 aa, Streptococcus mutans
MKKPYSIGLDIGTNSVGWAVVTDDYKVPAKKMKVLGNTDKSHIKKNLLGALLFDSGNTAADRRLKRTARRRYTRRRNRILYLQEIFAEEMSKVDDSFFHRLEDSFLVTEDKRGERHPIFGNLEEEVKYHENFPTIYHLRQYLADNPEKVDLRLVYLALAHIIKFRGHFLIEGKFDTRNNDVQRLFQEFLAVYDNTFENSSLQEQNVQVEEILTDKISKSAKKDRVLKLFPNEKSNGRFAEFLKLIVGNQADFKKHFELEEKAPLQFSKDTYEEELEVLLAQIGDNYAELFLSAKKLYDSILLSGILTVTDVSTKAPLSASMIQRYNEHQMDLVQLKQFIRQKLSDKYNEVFSDVSKDGYAGYIDGKTNQEAFYKYLKGLLNKIEGSGYFLDKIEREDFLRKQRTFDNGSIPHQIHLQEMRAIIRRQAEFYPFLADNQDRIEKILTFRIPYYVGPLARGKSDFAWLSRKSADKITPWNFDEIVDKESSAEAFINRMTNYDLYLPNQKVLPKHSLLYEKFTVYNELTKVKYKTEQGKTAFFDANMKQEIFDGVFKVYRKVTKDKLMDFLEKEFDEFRIVDLTGLDKENKAFNASYGTYHDLRKILDKDFLDNSKNEKILEDIVLTLTLFEDREMIRKRLENYSDLLTKEQVKKLERRHYTGWGRLSAELIHGIRNKESRKTILDYLIDDGNSNRNFMQLINDDALSFKEEIAKAQVIGETDNLNQVVSDIAGSPAIKKGILQSLKIVDELVKIMGHQPENIVVEMARENQFTNQGRRNSQQRLKGLTDSIKEFGSQILKEHPVEHSQLQNDRLFLYYLQNGRDMYTGEELDIDYLSQYDIDHIIPQAFIKDNSIDNRVLTSSKENRGKSDDVPSKNVVRKMKSYWSKLLSAKLITQRKFDNLTKAERGGLTDDDKAGFIKRQLVETRQITKHVARILDERFHTETDENNKKIRQVKIVTLKSNLVSNFRKEFELYKVREINDYHHAHDAYLNAVIGKALLGVYPQLEPEFVYGDYPHFHGHKENKATAKKFFYSNIMNFFKKDDVRTDKNGEIIWKKDEHISNIKKVLSYPQVNIVKKVEEQTGGFSKESILPKGNSDKLIPRKTKKFYWDTKKYGGFDSPIVAYSILVIADIEKGKSKKLKTVKALVGVTIMEKMTFERDPVAFLERKGYRNVQEENIIKLPKYSLFKLENGRKRLLASARELQKGNEIVLPNHLGTLLYHAKNIHKVDEPKHLDYVDKHKDEFKELLDVVSNFSKKYTLAEGNLEKIKELYAQNNGEDLKELASSFINLLTFTAIGAPATFKFFDKNIDRKRYTSTTEILNATLIHQSITGLYETRIDLSKLGGD

SEQ ID NO: 165 - protein, 1345 aa, Streptococcus mutans
MKKPYSIGLDIGTNSVGWAVVTDDYKVPAKKMKVLGNTDKSHIKKNLLGALLFDSGNTAEDRRLKRTTRRRYTRRRNRILYLQEIFSEEMGKVDDSFFHRLEDSFLVTEDKRGERHPIFGNLEEEVKYHENFPTIYHLRQYLADNPEKTDLRLVYLALAHIIKFRGHFLIEGKFDTRNNDVQRLFQEFLAVYDNTFENSSLQEQNVQVEEILTDKISKSAKKDRVLKLFPNEKSNGRFAEFLKLIVGNQADFKKHFELEEKAPLQFSKDTYEEELEVLLAQIGDNYAELFLSAKKLYDSILLSGILTVTDVSTKAPLSASMIQRYNEHQMDLTQLKQFIRQKLSDKYNEVFSDVSKDGYAGYIDGKTNQEAFYKYLKGLLNKIEGSGYFLDKIEREDFLRKQRTFDNGSIPHQIHLQEMRAIIRRQAEFYPFLADNQDRIEKLLTFRIPYYVGPLASGKSDFAWLSRKSADKITPWNFDEIVDKESSAEAFINRMTNYDLYLPNQKVLPKHSLLYEKFTVYNELTKVKYKTEQGKTAFFDANMKQEIFDGVFKVYRKVTKDKLMDFLEKEFDEFRIVDLTGLDKENKVFNASYGTYHDLCKILDKDFLDNSKNEKILEDIVLTLTLFEDREMIRKRLENYSDLLTKEQVKKLERRHYTGWGRLSAELIHGIRNKESRKTILDYLIDDGNSNRNFMQLINDDALSFKEEIAKAQVIGETDNLNQVVSDIAGSPAIKKGILQSLKIVDELVKIMGHQPENIVVEMARENQFTNQGRRNSQQRLKGLTDSIKEFGSQILKEHPVENSQLQNDRLFLYYLQNGRDMYTGEELDIDYLSQYDIDHIIPQAFIKDNSIDNRVLTSSKENRGKSDDVPSKDVVRKMKSYWSKLLSAKLITQRKFDNLTKAERGGLTDDDKAGFIKRQLVETRQITKHVARILDERFNTETDENNKKIRQVKIVTLKSNLVSNFRKEFELYKVREINDYHHAHDAYLNAVIGKALLGVYPQLEPEFVYGDYPHFHGHKENKATAKKFFYSNIMNFFKKDDVRTDKNGEIIWKKDEHISNIKKVLSYPQVNIVKKVEEQTGGFSKESILPKGNSDKLIPRKTKKFYWDTKKYGGFDSPIVAYSILVIADIEKGKSKKLKTVKALVGVTIMEKMTFERDPVAFLERKGYRNVQEENIIKLPKYSLFKLENGRKRLLASARELQKGNEIVLPNHLGTLLYHAKNIHKVDEPKHLDYVDKHKDEFKELLDVVSNFSKKYTLAEGNLEKIKELYAQNNGEDLKELASSFINLLTFTAIGAPATFKFFDKNIDRKRYTSTTEILNATLIHQSITGLYETRIDLSKLGGD

SEQ ID NO: 166 - protein, 1336 aa, Streptococcus mutans
MKKPYSIGLDIGTNSVGWAVVTDDYKVPAKKMKVLGNTDKSHIKKNLLGALLFDSGNTAADRRLKRTARRRYTRRRNRILYLQEIFAEEMNKVDDSFFHRLDESFLTDDDKNFDSHPIFGNKAEEDAYHQKFPTIYHLRKHLADSTEKADLRLVYLALAHMIKFRGHFLIEGELNAENTDVQKLFADFVGVYDRTFDDSHLSEITVDASSILTEKISKSRRLEKLINNYPKEKKNTLFGNLIALSLGLQPNFKTNFKLSEDAKLQFSKDTYEEDLEELLGKIGDDYADLFTLAKNLYDAILLSGILTADDSSTKAPLSASMIKRYAEHHEDLEKLKEFIKANKPELYHDIFKDETKNGYAGYIENGVKQDEFYKYLKNTLSKIAGSDYFLDKIEREDFLRKQRTFDNGSIPHQIHLQEMHAILRRQGDYYPFLKENQDRIEKILTFRIPYYVGPLARKNSRFAWAEYHSDEAVTPWNFDQVIDKESSAQAFIEHMTNNDLYLPNEKVLPKHSPLYEKYTVYNELTKIKYVTEIGEAKFFDANLKQEIFDGLFKHERKVTKKKLRTFLDKNFDEFRIVDIQGLDKETETFNASYATYQDLLKVIKDKVFMDNPENAEILENIVLTLTLFEDREMIKQRLAKYADVFDKKVIDQLARRHYTGWGRLSAKLLNGIRDKQSCKTIMDYLIDDAQSNRNLMQLITDDNLTFKDDIVKAQYVDNSDDLHQVVQSLAGSPAIKKGILQSLKIVDELVKVMGKEPEQIVVEMARENQTTAKGRRNSQQRYKRLKEAIKDLNHKILKEHPTDNQALQNNRLFLYYLQNGRDMYTGESLDINRLSDYDIDHVIPQAFIKDNSIDNRVLTSSKANRGKSDDVPSEDVVNRMRPFWNKLLSSGLISQRKYNNLTKKELTLDDKAGFIKRQLVETRQITKHVARMLDERFNKEFDDNNKRIRRVKIVTLKSNLVSSFRKEFELYKVREINDYHHAHDAYLNAVVVKALLVKYPKLEPEFVYGEYPKYNSYRERKATQKMFFYSNIMNMFKSKVKLADDQIVERPMIEVNDETGEIAWDKTKHITTVKKVLSYPQVNIVKKVEEQTGGLFDPKSPLEKLVPLKKALNPEKYGGYQKPTTAYPILLIVDTKQLIPISVMDKKRFEQNPVKFLKDKGYQQIEKNNFVKLPKYTLVDIGNGIKRLWASSKEVHKGNQLVVSKKSQDLLYHAHHLDNDYSNEYVKNHYQQFDILFNEITSFSKKCKLGKEHIQKIEEAYSKERDSASIEELADGFIKLLGFTQLGATSPFSFLGIKLNQKQYTGKKDYLEATLIHQSITGLYETRIDLSKLGGD

SEQ ID NO: 167 - protein, 1345 aa, Streptococcus mutans
MKKPYSIGLDIGTNSVGWAVVTDDYKVPAKKMKVLGNTDKSHIKKNLLGALLFDSGNTAADRRLKRTARRRYTRRRNRILYLQEIFAEEMSKVDDSFFHRLEDSFLVTEDKRGERHPIFGNLEEEVKYYENFPTIYHLRQYLADNPEKVDLRLVYLALAHIIKFRGHFLIEGKFDTRNNDVQRLFQEFLAVYDNTFENSSLQEQNVQVEEILTDKISKSAKKDRVLKLFPNEKSNGRFAEFLKLIVGNQADFKKHFELEEKAPLQFSKDTYEEDLEELLGKIGDDYADLFTLAKNLYDAILLSGILTADDSSTKAPLSASMIQRYNEHQMDLAQLKQFIRQKLSDKYNEVFSDVSKDGYAGYIDGKTNQEAFYKYLKGLLNKIEGSGYFLDKIEREDFLRKQRTFDNGSIPHQIHLQEMRAIIRRQAEFYPFLADNQDRIEKILTFRIPYYVGPLARGKSDFAWLSRKSADKITPWNFDEIVDKESSAEAFINRMTNYDLYLPNQKVLPKHSLLYEKFTVYNELTKVKYKTEQGKTAFFDANMKQEIFDGVFKVYRKVTKDKLMDFLEKEFDEFRIVDLTGLDKENKVFNASYGTYHDLCKILDKDFLDNSKNEKILEDIVLTLTLFEDREMIRKRLENYSDLLTKEQVKKLERRHYTGWGRLSAELIHGIRNKESRKTILDYLIDDGNSNRNFMQLINDDALSFKEEIAKAQVIGETDNLNQVVSDIAGSPAIKKGILQSLKIVDELVKIMGHQPENIVVEMARENQFTNQGRRNSQQRLKGLTDSIKEFGSQILKEHPVENSQLQNDRLFLYYLQNGRDMYTGEELDIDYLSQYDIDHIIPQAFIKDNSIDNRVLTSSKENRGKSDDVPSKDVVRKMKPYWSKLLSAKLITQRKFDNLTKAERGGLTDDDKAGFIKRQLVETRQITKHVARILDERFNTETDENNKKIRQVKIVTLKSNLVSNFRKEFELYKVREINDYHHAHDAYLNAVIGKALLGVYPQLEPEFVYGDYPHFHGHEENKATAKKFFYSNIMNFFKKDDVRTDKNGEIIWKKDEHISNIKKVLSYPQVNIVKKVEEQTGGFSKESILPKGNSDKLIPRKTKKFYWDTKKYGGFDSPIVAYSILVIADIEKGKSKKLKTVKALVGVTIMEKMTFERDPVAFLERKGYRNVQEENIIKLPKYSLFKLENGRKRLLASARELQKGNEIVLPNHLGTLLYHAKNIHKVDEPKHLDYVDKHKDEFKELLDVVSNFSKKYTLAEGNLEKIKELYAQNNGEDLKELASSFINLLTFTAIGAPATFKFFDKNIDRKRYTSTTEILNATLIHQSITGLYETRIDLSKLGGD

SEQ ID NO: 168 - protein, 1345 aa, Streptococcus mutans
MKKPYSIGLDIGTNSVGWAVVTDDYKVPAKKMKVLGNTDKSHIKKNLLGALLFDSGNTAEDRRLKRTTRRRYTRRRNRILYLQEIFSEEMGKVDDSFFHRLEDSFLVTEDKRGERHPIFGNLEEEVKYHENFPTIYHLRQYLADNPEKTDLRLVYLALAHIIKFRGHFLIEGKFDTRNNDVQRLFQEFLAVYDNTFENSSLQEQNVQVEEILTDKISKSAKKDRVLKLFPNEKSNGRFAEFLKLIVGNQADFKKHFELEEKAPLQFSKDTYEEELEVLLAQIGDNYAELFLSAKKLYDSILLSGILTVTDVSTKAPLSASMIQRYNEHQMDLTQLKQFIRQKLSDKYNEVFSDVSKDGYAGYIDGKTNQEAFYKYLKGLLNKIEGSGYFLDKIEREDFLRKQRTFDNGSIPHQIHLQEMRAIIRRQAEFYPFLADNQDRIEKLLTFRIPYYVGPLASGKSDFAWLSRKSADKITPWNFDEIVDKESSAEAFINRMTNYDLYLPNQKVLPKHSLLYEKFTVYNELTKVKYKTEQGKTAFFDANMKQEIFDGVFKVYRKVTKDKLMDFLEKEFDEFRIVDLTGLDKENKVFNASYGTYHDLCKILDKDFLDNSKNEKILEDIVLTLTLFEDREMIRKRLENYSDLLTKEQVKKLERRHYTGWGRLSAELIHGIRNKESRKTILDYLIDDGNSNRNFMQLINDDALSFKEEIAKAQVIGETDNLNQVVSDIAGSPAIKKGILQSLKIVDELVKIMGHQPENIVVEMARENQFTNQGRRNSQQRLKGLTDSIKEFGSQILKEHPVENSQLQNDRLFLYYLQNGRDMYTGEELDIDYLSQYDIDHIIPQAFIKDNSIDNRVLTSSKENRGKSDDVPSKDVVRKMKSYWSKLLSAKLITQRKFDNLTKAERGGLTDDDKAGFIKRQLVETRQITKHVARILDERFNTETDENNKKIRQVKIVTLKSNLVSNFRKEFELYKVREINDYHHAHDAYLNAVIGKALLGVYPQLEPEFVYGDYPHFHGHKENKATAKKFFYSNIMNFFKKDDVRTDKNGEIIWKKDEHISNIKKVLSYPQVNIVKKVEEQTGGFSKESILPKGNSDKLIPRKTKKFYWDTKKYGGFDSPIVAYSILVIADIEKGKSKKLKTVKALVGVTIMEKMTFERDPVAFLERKGYRNVQEENIIKLPKYSLFKLENGRKRLLASARELQKGNEIVLPNHLGTLLYHAKNIHKVDEPKHLDYVDKHKDEFKELLDVVSNFSKKYTLAEGNLEKIKELYAQNNGEDLKELASSFINLLTFTAIGAPATFKFFDKNIDRKRYTSTTEILKATLIHQSITGLYETRIDLSKLGGD

SEQ ID NO: 169 - protein, 1338 aa, Streptococcus mutans
MDLIGTNSVGWAVVTDDYKVPAKKMKVLGNTDKSHIKKNLLGALLFDSGNTAADRRLKRTARRRYTRRRNRILYLQEIFAEEMSKVDDSFFHRLEDSFLVTEDKRGERHPIFGNLEEEVKYHENFPTIYHLRQYLADNPEKVDLRLVYLALAHIIKFRGHFLIEGKFDTRNNDVQRLFQEFLAVYDNTFENSSLQEQNVQVEEILTDKISKSAKKDRVLKLFPNEKSNGRFAEFLKLIVGNQADFKKHFELEEKAPLQFSKDTYEEELEVLLAQIGDNYAELFLSAKKLYDSILLSGILTVTDVSTKAPLSASMIQRYNEHQMDLAQLKQFIRQKLSDKYNEVFSDVSKDGYAGYIDGKTNQEAFYKYLKGLLNKIEGSGYFLDKIEREDFLRKQRTFDNGSIPHQIHLQEMRAIIRRQAEFYPFLADNQDRIEKILTFRIPYYVGPLARGKSDFAWLSRKSADKITPWNFDEIVDKESSAEAFINRMTNYDLYLPNQKVLPKHSLLYEKFTVYNELTKVKYKTEQGKTAFFDANMKQEIFDGVFKVYRKVTKDKLMDFLEKEFDEFRIVDLTGLDKENKAFNASYGTYHDLRKILDKDFLDNSKNEKILEDIVLTLTLFEDREMIRKRLENYSDLLTKEQVKKLERRHYTGWGRLSAELIHGIRNKESRKTILDYLIDDGNSNRNFMQLINDDALSFKEEIAKAQVIGETDNLNQVVSDIAGSPAIKKGILQSLKIVDELVKIMGHQPENIVVEMARENQFTNQGRRNSQQRLKGLTDSIKEFGSQILKEHPVEHSQLQNDRLFLYYLQNGRDMYTGEELDIDYLSQYDIDHIIPQAFIKDNSIDNRVLTSSKENRGKSDDVPSKNVVRKMKSYWSKLLSAKLITQRKFDNLTKAERGGLTDDDKAGFIKRQLVETRQITKHVARILDERFHTETDENNKKIRQVKIVTLKSNLVSNFRKEFELYKVREINDYHHAHDAYLNAVIGKALLGVYPQLEPEFVYGDYPHFHGHKENKATAKKFFYSNIMNFFKKDDVRTDKNGEIIWKKDEHISNIKKVLSYPQVNIVKKVEEQTGGFSKESILPKGNSDKLIPRKTKKFYWDTKKYGGFDSPIVAYSILVIADIEKGKSKKLKTVKALVGVTIMEKMTFERDPVAFLERKGYRNVQEENIIKLPKYSLFKLENGRKRLLASARELQKGNEIVLPNHLGTLLYHAKNIHKVDEPKHLDYVDKHKDEFKELLDVVSNFSKKYTLAEGNLEKIKELYAQNNGEDLKELASSFINLLTFTAIGAPATFKFFDKNIDRKRYTSTTEILNATLIHQSITGLYETRIDLSKLGGD

SEQ ID NO: 170 - protein, 1362 aa, Streptococcus oralis
ENKNYSIGLDIGTNSVGWAVITDDYKVPSKKMKVLGNTDKRFIKKNLIGALLFDEGTTAEARRLKRTARRRYTRRKNRLRYLQEIFAEEMSKVDSSFFHRLDDSFLIPEDKKGSKYPIFATLIEEKEYHKQFPTIYHLRKQLADSKEKTDLRLIYLALAHMIKYRGHFLYEDTFDIKNNDIQKIFNEFISIYNNTFEGNSLSGQNVQVEAIFTDKISKSAKRERVLKLFPDEKSTGLFSEFLKLIVGNQADFKKHFDLEEKAPLQFSRDTYDEDLENLLGQIGDDFADLFVAAKKLYDAILLSGILTVTDPSTKAPLSASMIERYENHQKDLATLKQFIKTNLPEKYDEVFSDQSKDGYAGYIDGKTTQESFYKYIKNLLSKFEGADYFLEKIEREDFLRKQRTFDNGSIPHQIHLQEMNAILRRQGEHYPFLKENKEKIEKILTFRIPYYVGPLARGNRDFAWLTRNSDQAIRPWNFEEIVDKASSAESFINKMTNYDLYLPEEKVLPKHSLLYETFAVYNELTKVKFIAEGLRDYQFLDSRQKKDIFYTLFKAEDKRKVTEKDIIQYLHTVDGYDGIELKGIEKQFNASLSTYHDLLKIIKDKEFMDDPNNEEILENIVHTLTIFEDREMIKQRLAQYDSLFDEKVIKALTRRHYTGWGKLSSKLINGIRDKQTGKTILDYLMDDGYNNRNFMQLINDDELSFKEIIKKAQVVGKTDDVKQVVQELPGSPAIKKGILQSIKLVDELVKVMGHEPESIVIEMARENQTTARGKKNSQQRYKRIEDSLKILASKILKEHPTDNIQLQNDRLFLYYLQNGRDMYTGKPLDINQLSSYDIDHIVPQAFIKDDSLDNRVLTSLKDNRGKSDNVPSLEVVEKMKTFWQQLLDSKLISYRKFNNLTKAERGGLDERDKVGFIKRQLVETRQITKHVAQILDARYNTEVNEKDKKNRTVKIITLKSNLVSNFRKEFRLYKIREINDYHHAHDAYLNAVVAKAILKKYPKLEPEFVYGDYQKYDLSKDPKEIEKATEKYFFYSNLLNFFKEEVHYADGTIVKRENIEYSKDTGEIAWNKEKDFATIKKVLSLPQVNIVKKREVQTGGFSKESILPKGNSDKLIPRKTKDILWDTTKYGGFDSPVIAYSILLIADIEKGKAKRLKTVKTLVGITIMEKATFEKSPIAFLENKGYHNVRKENILCLPKYSLFELKNGRRRMLASAKELQKGNEIVLPVHLTTLLYHAKNIHRLDEPEHLEYIQKHRNEFKGLLNLVSEFSQKYVLADANLEKIKNLYADNEQADIEILANSFINLLTFTALGAPAAFKFFGKDVDRKRYTTVSEILNATLIHQSITGLYETRIDLSKLGED

SEQ ID NO: 171 - protein, 1360 aa, Streptococcus oralis
ENKNYSIGLDIGTNSVGWSVITDDYKVPSKKMKVLGNTDKRFIKKNLIGALLFDEGTTAEARRLKRTARRRYTRRKNRLRYLQEIFAEEMSKVDSSFFHRLDDSFLIPEDKRGSKYPIFATLAEEKEYHKQFPTIYHLRKQLADSKEKTDLRLIYLALAHMIKYRGHFLYEDTFDIKNNDIQKIFSEFISIYDNTFEGSSLSGQNAQVEAIFTDKISKSAKRERVLKLFPDEKSTGLFSEFLKLIVGNQADFKKHFDLGEKAPLQFSKDTYDEDLENLLGQIGDDFADLFLVAKKLYDAILLSGILTVTDPSTKAPLSASMIERYENHQKDLAVLKQFIKNNLPEKYDEVFSDQSKDGYAGYIDGKTTQEAFYKYIKNLLSKFEGTDYFLEKIEREDFLRKQRTFDNGSIPHQIHLQEMNAILRRQGEHYPFLKDNKEKIEKILTFRIPYYVGPLARGNRDFAWLTRNSDEAIRPWNFEEIVDKASSAEDFINKMTNYDLYLPEEKVLPKHSLLYETFAVYNELTKVKFIAEGLRDYQFLDSGQKKQIVTQLFKEKRKVTEKDIIQFLHNVDGYDGIELKGIEKQFNASLSTYHDLLKIIKDKEFMDDSKNEEILENIVHTLTIFEDREMIKQRLAQYDSLFDEKVIKALIRRHYTGWGKLSAKLIDGICDKQTGNTILDYLIDDGKNNRNFMQLINDDGLSFKEITQKAQVVGKTDDVKQVVQELPGSPAIKKGILQSIKIVDELVKVMGHTPESIVIEMARENQTTARGKKNSQQRYKRIEDALKNLASNILKEHPTNNIQLQNDRLFLYYLQNGRDMYTGKPLDINQLSSYDIDHIVPQAFIKDDSLDNRVLTSLKDNRGKSDNVPSIEVVQKRKAFWQQLLDSKLISERKFNNLTKAERGGLDERDKVGFIKRQLVETRQITKHVAQILDARFNKEVNEKDKKNRTVKIITLKSNLVSNFRKEFRLYKVREINDYHHAHDAYLNAVVAKAILKKYPKLEPEFVYGDYQKYDLSRNPKEVEKATEKYFFYSNLLNFFKEEVHYADGTIVKRENIEYSKDTGEIAWNKEKDFATIKKVLSYPQVNIVKKREVQTGGFSKESILPKGNSDKLIPRKTKDILWETTKYGGFDSPVIAYSILLIADIEKGKAKKLKTVKTLVGITIMEKAAFEENPITFLENKGYHNVRKENILCLPKYSLFELENGRRRLLASAKELQKGNEIVLPVYLTTLLYHSKNVHKLDEPEHLEYIQKHRNEFKDLLNLVSEFSQKYVLADANLEKIQNLYADNEQADIEILANSFINLLTFTALGAPAAFKFFGKDIDRKRYTTVSEILNATLIHQSITGLYETRIDLSKLGED

SEQ ID NO: 172 - protein, 1358 aa, Streptococcus parasanguinis
KKPYSIGLDIGTNSVGWAVITDDYKVPAKKMKVLGNTNKESIKKNLIGALLFDAGNTAADRRLKRTARRRYTRRRNRILYLQEIFAAEMNKVDESFFHRLDDSFLVPEDKRGSKYPIFGTLEEEKEYHKQFPTIYYLRKILADSKEKVDLRLIYLALAHIIKYRGHFLYEDSFDIKNNDIQKIFNEFTILYDNTFEESSLSKGNAQVEEIFTDKISKSAKRDRVLKLFPDEKSTGLFSEFLKLIVGNQADFKKHFDLEEKAPLQFSKDTYEEDLESLLGQIGDVYADLFVVAKKLYDAILLAGILSVKDPGTKAPLSASMIERYDNHQNDLSALKQFVRRNLPEKYAEVFSDDSKDGYAGYIDGKTTQEGFYKYIKNLISKIEGAEYFLEKIEREDFLRKQRTFDNGSIPHQIHLQEMNAILRHQGEYYPFLKENKDKIEQILTFRIPYYVGPLARGNSDFAWLSRNSDEAIRPWNFEEMVDKSSSAEDFIHRMTNYDLYLPEEKVLPKHSLLYETFTVYNELTKVKYIAEGMKDYQFLDSGQKKQIVNQLFKEKRKVTEKDIIHYLHNVDGYDGIELKGIEKHFNSSLSTYHDLLKIIKDKEFMDDPKNEEIFENIVHTLTIFEDRVMIKQRLNQYDSIFDEKVIKALTRRHYTGWGKLSAKLINGIRDKKTSKTILDYLIDDGYSNRNFMQLINDDGLSFKETIQKAQVVGETNDVKQVVQELPGSPAIKKGILQSIKIVDELVKVMGHAPESVVIEMARENQTTNKGKSKSQQRLKTLSDAISELGNILKEHPTDNIQLQNDRLFLYYLQNGKDMYTGEALDINQLSNYDIDHIIPQAFIKDDSLDNRVLTSSKDNRGKSDNVPSLEIVEKMKGFWQQLLDSKLISERKFNNLTKAERGGLDERDKVGFIKRQLVETRQITKHVAQILDDRFNAEVNEKNQKLRSVKIITLKSNLVSNFRKEFGLYKVREINDYHHAHDAYLNAVVAKAILKKYPKLEPEFVYGDYQKYDLTKDPKEIEKATEKYFFYSNLLNFFKDKVYYADGTIIQRGNVEYSKDTGEIAWNKKRDFAIVRKVLSYPQVNIVKKTEEQTGGFSKESILPKGNSDKLIPRKTKNVQLDTTKYGGFDSPVIAYSILLVADVEKGKSKKLKTVKSLIGITIMEKVKFEANPVAFLEGKGYQNVVEENIIRLPKYSLFELENGRRRMLASAKELQKGNEMVLPSYLIALLYHAKRIQKKDEPEHLEYIKQHHSEFNDLLNFVSEFSQKYVLAESNLEKIKNLYIDNEQTNMEEIANSFINLLTFTAFGAPAVFKFFGKDIERKRYSTVTEILKATLIHQSLTGLYETRIDLSKLGEE

SEQ ID NO: 173 - protein, 1327 aa, Streptococcus parauberis
MKVLGNTDRQTVKKNMIGTLLFDSGETAEARRLKRTARRRYTRRINRIKYLQSIFDDEMSKIDSAFFQRIKDSFLVPDDKNDDRHPIFGNIKDEVDYHKNYPTIYHLRKKLADSDEKADLRLIYLALAHIIKFRGHFLIEGDLDSQNTDVNALFLKLVDTYNLMFEDDIDTQTIDATVILTEKMSKSRRLENLIAKIPNQKKNTLFGNLISLSLGLTPNFKANFELSEDAKLQISKESFEEDLDNLLAQIGDQYADLFIAAKNLSDAILLSDILTVKGVNTKAPLSASMVQRFNEHQDDLKLLKKLVKVQLPEKYKEIFDIKDKNGYAGYINGKTSQEDFYKYIKPILSKLKGAESLISKLEREDFLRKQRTFDNGSIPHQIHLNELKSIIRRQEKYYPFLKDKQVRIEKIFTFRIPYFVGPLANGNSSFAWVKRRSNESITPWNFEEVVEQEASAKVFIERMTNFDTYLPEEKVLPKHSLLYEMFTVYNELTKVKYQAEGMRKPEFLSSEEKIEIVSNLFKTERKVTVKQLKENYFNKIRCLDSITISGVEDKFNASLGTYHDLLNIIKNQKILDDEQNQDSLEDIVLTLTLFEDEKMIAKRLSKYESIFDPSILKKLKKRHYTGWGRLSQKLINGIRDKQTGKTILDFLIDGQANRNFMQLINDPSLDFASIIKEAQEKTIKSEKLEETIANLAGSPAIKKGILQSVKIVDEVVKVMGYEPSNIVIEMARENQSTQRGINNSRERLRKLEEVHKNIGSKILKEHEISNAQLQSDRVYLYLLQDGKDMYTGKDLDFDRLSQYDIDHIIPQSFIKDNSIDNIVLTSQESNRGKSDNVPYIAIVNKMKSYWQHQLKSGAISQRKFDNLTKAERGGLSEYDKAGFIKRQLVETRQITKHVAQILNNRFNNNVDDSSKNKRPVKIITLKSKMVSDFRKEFGFYKIREVNDYHHAHDAYLNAVVGTALLKKYPKLEAEFVYGDYKHYDLSDTSLGKATAKMFFYSNIMNFFKKEVRLADGTVITRPQIETNTETGEIVWDKVKDIKTIRKVLSIPQINVVKKTEVQTGGFSKESILSKRDSDKLIPRKNNWDPKKYGGFGSPIIAYSVLVVAKVTKGKSQKTKSVKELVGITIMEQNEFEKDRITFLEKKGYQDIQESLIIKLPKFSLFELENGRKRLLASELQKGNELSLPNKYIQFLYLASRYTSFSGKEEDREKHRHFVESHLHYFDEIKDIIADFSRRYILADANLEKILTLYNEKNQFSIEEQATNMLNLFTFTGLGAPATLKFFNVDIDRKRYTSSTEILNSTLIRQSITGLYETRIDLSKIGGD

SEQ ID NO: 174 - protein, 1355 aa, Streptococcus phocae
KKSYSIGLDIGTNSVGWAVITDDYKVPAKKMKVLGNTSRQSIKKNMIGALLFDEGGPAASTRVKRTTRRRYTRRKNRLCYLRDIFESEMHTIDKHFFLRLEDSFLHKSDKRYEAHPIFGTLQEEKAYHDNYPTIYHLRKALADNTEKADLRLIYLALAHIIKFRGHFLIEGALSANNTDVQQLVHALVDAYNIMFEEDLDIEAIDVKAILTEKISKTRRLENLISNIPGQKKNGLFGNLIALSLGLTPNFKSHFNLPEDAKLQLAKDTYDEELNNLLTQIGDEYADLFLSAKNLSDAILLSDILTVNGDGTQAPLSASLIKRYEEHRQDLALLKQMFKEQLPDLYRDVFTDENKDGYAGYISGKTSQEAFYKYIKPILETLDGAEDFLTKINREDFLRKQRTFDNGSIPHQIHLGELQAILERQQAYYPFLKDNQEKIEKILTFRIPYYIGPLARGNSRFAWLTRTSDQKITPWNFDEMVDQEASAQAFIERMTNFDEYLPQEKVLPKHSLTYEYFTVYNELTKVKYVTEGMTKPEFLSAGQKEQIVELLFKKYRKVTVKQLKEDFFSKIECFDTVDISGVEDKFNASLGTYHDLLKIIKDKAFLDNSENENIIEDIILTLTLFEDKEMIANRLAVYEDLFDQNVLKQLKRRHYTGWGRLSKQLINGMRDKHTGKTILDFLKDGFINRNFMQLINDDNLSFKEEIKKAQEGGLKDSINDQIRDLAGSPAIKKGILQTINIVDEIVKIMGKAPQHIVVEMARDVQKTDIGVKQSRERMKRVQEVLKKLGSQLLKEHPVENFQLQNERLYLYYLQNGKDMYTGEELSISNLSHYDIDHIIPRSFIKDDSIDNKVLTRSEHNRGKTDNVPSIEVVKRMKPYWQKLLDTKVISQRKFDNLTKAERGGLQESDKANFIQRQLVETRQITKHVAQILDSRFNTERDEKDRPIRRVKVITLKSKFVSDFRQDFGFYKLREINDYHHAHDAYLNAVVGTALLKMYPKLASEFVYGDYQKYDLSGKASGHATAKYFFYSNLMNFFKSEVKLANGNIIKRSPIEVNEETGEIVWDKTKDFGTVRKVLSAPQVNIVKKTEIQTGGFSNETILSKGKSSKLIPRKNKWRDTTKYGGFNTPTVAYSVLVVAKVEKGKAKKLKPVKELVGITIMERTKFEANPIAFLESKGYHDIQEHLMITLPKYSLFELENGRRRLLASELQKGNEMVLPQHLVTFLYRVSKRDKGTQSENMEYISNHKEKFIEIFHYIIRYAEKNVIKPKVIERLNDTFNQKFNDSDLTELSISFLNLFKFTSFGAPEKFTFLNSEIKQDDVRYRSTKECLNSTLIHQSVTGLYETRIDLSQFGGD

SEQ ID NO: 175 - protein, 1361 aa, Streptococcus pseudopneumoniae
SNKPYSIGLDIGTNSVGWAVITDDYKVPSKKMKVLGNTDKHFIKKNLIGALLFDEGTTAEDRRLKRTARRRYTRRKNRLRYLQEIFSEEISKVDNSFFHRLDDSFLVPEDKRGSKYPIFATLTEEKEYYKQFPTIYHLRKQLADSKEKADLRLIYLTLAHMIKYRGHFLYEESFDIKNNDIQKIFNEFISIYDNTFEGSSLSGQNAQVEAIFTDKISKSTKRERVLKLFPDQKSTGLFSEFLKLIVGNQADFKKHFDLEEKAPLQFSKDTYDEDLENLLGQIGDDFADLFLVAKKLYDAILLSGILTVTDPSTKAPLSASMIERYENHQKDLAALKQFIKNNLPEKYDEVFSDQSKEGYAGYIDSKTTQEAFYKYIKNLLSKIDGADYLLDKIEREDFLRKQRTFDNGSIPHQIHLQEMNAILRRQGEHYPFLKENREKIEKILTFRIPYYVGPLARGNRDFAWLTRNSDQAIRPWNFEEIVDKASSAEAFINKMTNYDLYLPEEKVLPKHSLLYETFAVYNELTKVKFIAEGLRDYQFLDSGQKKKIINQLFKEKRKVTEKDLIHYLHNVDGYDGIELKGIEKQFNASLSTYHDLLKIIKDKRFMDEPKNQEILENIVHTLTIFEDREMIKQRLAQYASIFDEKVIKTLTRRHYTGWGKLSAKLINCIRDRKTGKTILDYLIDDGYNNRNFMQLINDDGLSFKEIIQESQVVGKPDDVKQIVQELPGSSAIKKGILQSIKLVDELVKVMGHDPESIVIEMARENQTTARGKKNSQQRYKRIEDSLKILASNILKEHPTDNIQLQNDRLFLYYLQNGKDMYTGNPLDINHLSSYDIDHIIPQAFIKDDSLDNRVLTSSKDNRGKSDNVPSLEVVQKRKAFWQQLLESKLISERKFNNLTKAERGGLNERDKVGFIKRQLVETRQITKHVAQILDSRFNTKVNEKNQKIRTVKIITLKSNLVSNFRKEFRLYKVREINDYHHAHDAYLNAVVAKAILKKYPKLEPEFVYGDYQKYDLSRDPKEIEKATEKYFFYSNLLNFFKEEVHYADGTIVKRENIEYSKDTGEIAWNKEIDFATIRKILSLSQVNIVKKTEEQTGGLFDNNIVSKKKVVDASKLIPIKSGLSPEKYGGYARPTIAYSVLVIADIEKGKAKKLKRIKEMVGITIQDKKKFEANPTAYLEEYGYKNINPNLIIKLPKYSLFKFNDGQRRLLASSIELQKGNELILPYHFTTLLYHAQRINKISEPIHKQYVETHQSEFEELLTTIISLSKKYIQKPIVESLLQQAFEQADKDIYQLSESFISLLKLTSFGAPGAFRFLGVEISQSNVRYQSVSSCFNATLIHQSITGLYETRIDLSKLGED

SEQ ID NO: 176 - protein, 1361 aa, Streptococcus pseudopneumoniae
SNKPYSIGLDIGTNSVGWVIITDDYKVPSKKMKVLGNTDKHFIKKNLIGALLFDEGTTAEDRRLKRTARRRYTRRKNRLRYLQEIFAEEMNKVDSSFFHRLDDSFLVPEDKRGSKYPIFATLAEEKEYHKNFPTIYHLRKQLADSKEKADLRLIYLALAHMIKYRGHFLYEEAFDIKNNDIQKIFNEFINIYDNTFEGSSLSGQNEQVEAIFSDKISKSAKRERVLKLFPDEKSTGLFSEFLKLIVGNQADFKKHFDLEEKAPLQFSKDTYDEDLENLLGQIGDGFADLFLVAKKLYDAILLSGILTVTDPSTKAPLSASMIERYQNHQNDLASLKQFIKNNLPEKYDEVFSDQSKDGYAGYVDGKTTQEAFYKYIKNLLSKFEGADYFLEKIEREDFLRKQRTFDNGSIPHQIHLQEMNAILRRQGEHYPFLKENKEKIEKILTFRIPYYVGPLARGNRDFAWLTRNSDQAIRPWNFEEIVDKASSAEDFINKMTNYDLYLPEEKVLPKHSLLYETFAVYNELTKVKFIAEGLRDYQFLDSGQKKQIVNQLFKEKRKVTEKDIIQYLHNVDGYDGIELKGIEKQFNASLSTYHDLLKIIKDKEFMDDSKNEEILENIVHTLTIFEDREMIKQRLAQYDSIFDEKVIKALTRRHYTGWGKLSAKLINGIRDKQTGKTILDYLIDDGYSNRNFMQLINDDGLSFKEIIQKAQVFGKTNDVKQVVQELPGSPAIKKGILQSIKIVEELVKVMGHEPESIVIEMARENQTTTRGKKNSQQRYKRIENSLKILASKILKEHPTDNNQLQNDRLFLYYLQNGKDMYTGEALDINQLSSCDIDHIIPQAFIKDDSLDNRVLTSSKENRGKSDNVPCLEVVDKMKVFWQQLLDFKLISYRKFNNLTKAERGGLDERDKVGFIRRQLVETRQITKHVAQILDSRFNTEVTEKDKKNRNVKIITLKSNLVSNFRKEFGLYKVREINDYHHAHDAYLNAVVAKAILKKYPKLEPEFVYGDYQKYDLSKDPKDIEKATEKYFFYSNLLNFFKEEVHYADGTIVKRENIEYSKDTGEIAWNKEKDFATIKKILSLPQVNIVKKTEEQTGGLFDNNIVSKKKVVDASKLIPIKSGLSPEKYGGYARPTIAYSVLVIADIEKGKTKKLKRIKEMIGITVQDKKIFESNPIAYLEECGYKNINPNLIIKLPKYSLFEFNGGQRRLLASSIELQKGNELILPYHFTALLYHTQRINKISEPIHKQYVEAHQNEFKELLTTIISLSKKYIQKPNVESLLQQAFEQADKDIYQLSESFISLLKLTSFGAPGAFKFLGVEISQSSVRYKPNSQFLDATLIHQSITGLYETRIDLSKLGED

SEQ ID NO: 177 - protein, 1363 aa, Streptococcus pseudopneumoniae
SNKPYSIGLDIGTNSVGWAVITDDYKVPSKKMTVLGNTDKHFIKKNLIGALLFDEGTTAEDRRLKRTARRRYTRRKNRLRYLQEIFSGEMSKVDSSFFHRLDDSFLVPEDKRGSKYPIFATLVEEKEYHKQFPTIYHLRKQLADSKEKADLRLIYLVLAHMIKYRGHFLYEEAFDIKNNDIQKIFNEFISIYDNTFEGSSLSGQNAQVETIFTDKISKSAKRERVLKLFPDEKSTGLFSEFLKLIVGNQADFKKHFDLGEKAPLQFSKDTYDEDLENLLGQIGDDFADLFLVAKKLYDAILLSGILTVTDPSTKAPLSASMIERYENHQKDLTTLKQFIKNNLPEKYDEVFSDQSKDGYAGYIDGKTTQEAFYKYIKNLLSKFEGTDYFLEKIEREDFLRKQRTFDNGSIPHQIHLQEMNAILRRQGEHYPFLKENKEKIEKILTFRIPYYVGPLARGNRDFAWLTRNSDQAIRPWNFEEIVDKASSAEDFINKMTNYDLYLPEEKVLPKHSLLYETFAVYNELTKVKFIAEGLRDYQFLDSGQKKQIVNQLFKEKRKVTEKDIIHYLHTVDGYDGIELKGIEKQFNASLSTYHDLLKIIKDKEFMDDSKNEAILENIVHTLTIFEDREMIKQRLAQYDSLFDKKVIKALTRRHYTGWGKLSAKLINGICDKQTGNTILDYLIDDGEINRNFMQLINDDGLSFKKIIQKSQVVGETDDVKQVVRELPGSPAIKKGILQSIKIVDELVKVMDHAPESIVIEMARENQTTARGKKNSQQRYKRIEDSLKILASNILKENPTDNNQLQNDRLFLYYLQNGKDMYTGEALDINQLSSYDIDHIIPQAFIKDDSLDNRVLTSSKDNRGKSDNVPSLEVVQKRKAFWQQLLDSKLISERKFNNLTKAERERDGLNELDKVGFIKRQLVETRQITKHVAQILDARFNKEVTEKDKKNRNVKIITLKSNLVSNFRKEFRLYKVREINDYHHAHDAYLNAVVAKAILKKYPKLEPEFVYGDYQKNDLSKDPKDIEKATEKYFFYSNLLNFFKEEVHYADGTIVKRENIEYSKDTGEIAWNKEKDFATIKKVLSYPQVNIVKKTEEQTGGLFDNNIVSKEKVVDASKLIPIKSGLSPEKYGGYARPTIAYSVLVIADIEKGKTKKLKRIKEMVGITIQDKKKFEANPIAYLEECGYKNINPNLIIKLPKYSLFEFNGGQRRLLASSIELQKGNELILPYHFTALLYHAQRINKFSEPIHKQYVEAHQNEFKELLTIIISLSKKYIQKPNVESLLHQAFEQADNDIYQLSESFISLLKLTSFGAPGAFKFLGAEISQSSVRYKPNSQFLDTTLIHQSITGLYETRIDLSKLGED

SEQ ID NO: 178 - protein, 1360 aa, Streptococcus pseudoporcinus
YSYSIGLDIGTNSVGWAVINEDYKVPAKKMTVFGNTDRKTIKKNLLGTVLFDSGETAQARRLKRTNRRRYTRRRYRLCQLQNIFATEMVKVDDTFFQRLSESFFYYQDKAFDKHPIFGNSKEERAYHKTYPTIYHLRKDLADRDQKADLRLIYLALSHIIKFRGHFLIEGKLNSENTDVQKLFIALVTVYNLLFEEEIAGETCDAKALLTAKTSKSKRLESLISEFPGQKKNGLFGNLLALALGLRPNFKSNFGLSEDAKLQITKDTYEEELDNLLAEIGDHYADLFLAAKNLSDAILLSDILTLSDENTRAPLSASMIKRYEEHQEDLALLKKLVKEQMPEKYWEIFSNAKKNGYAGYIEGKVSQEDFYRYIKPILSRLKGGDEFLAKIDRDDFLRKQRTFDNGSIPHQIHLKELHAILRRQEKYYPFLAEQKEKIEQLLCFRIPYYVGPLAKGGNSSFAWLKRRSDEPITPWNFKDVVDEEASAQAFIEGMTNYDTYLPEEKVLPKHSPLYEMFTVYNELTKVKYIAENMTKPLYLSAEQKEAIIDHLFKQTRKVTVKDLKEKYFSQIEGLENVDVTGVEGAFNASLGTYNDLLKIIKDKAFLDDEANAEILEEIVLILTLFQDEKLIEKRLAKYANLFEKSVLKKLRKRHYRGWGRLSRQLIDGMKDKASGKTILDFLKDDFANRNFIQLINDSSLDFEKLIDDAQKKAIKRESLTEAVANLAGSPAIKKGILQSLKVVDEIVKVMGHNPDNIVIEMSRENQTTAQGLKNARQRLKKIKEVHKKTGSRILEDNSERITNLTLQDNRLYLYLLQDGKDMYTGQDLDINNLSQYDIDHIIPQSFIKDNSIDNLVLTTQKANRGKSDNVPSIEVVRDMKDRVWRRQLANGAISRQKFDHLTKAERGGLADSDKARFLRRQLVETRQITKHVAQLLDSRFNSKSNQNKKLARNVKIITLKSKIVSDFRKDFGLYKLREVNNYHHAHDAYLNAVVGTALLKKYPKLEAEFVYGDYKHFDLSDPSLGKATAKVFFYSNIMNFFKEELSLADGTLMKRPVIETNTETGEVVWDKVKDFKTIRKVLSYPQVNIVKKTEIQSGAFSKESVLSKGNSDKLIERKKGWDPKKYGGFDSPNTAYSIFVVAKVAKRKAQKLKTVKEIVGITIMEQAEYEKDNIAFLEKKGYQDIQEKLLIKLPKYSLFELENGRRRLLASEFQKGNELALSGKYMKFLYLASRYDKLSSKIESEQQKKLFVEQHLHYFDEILDIVVKHATCYIKAENNLKKIISLYKKKEAYSINEQALNMLNLFIFTSLGAPSTFVFFDETIDRKRYTTSSDVLNGILIQQSITGLYETRIDLSRFGGD

SEQ ID NO: 179 - protein, 1316 aa, Streptococcus pseudoporcinus
MLGTVLFDSGETAQARRLKRTNRRRYTRRRYRLCQLQNIFATEMVKVDDTFFQRLSESFFYYQDKAFDKHPIFGNSKEERAYHKTYPTIYHLRKDLADRDQKADLRLIYLALSHIIKFRGHFLIEGKLNSENTDVQKLFIALVTVYNLLFEEEIAGETCDAKALLTAKTSKSKRLESLISEFPGQKKNGLFGNLLALALGLRPNFKSNFGLSEDAKLQITKDTYEEELDNLLAEIGDHYADLFLAAKNLSDAILLSDILTLSDENTRAPLSASMIKRYEEHQEDLALLKKLVKEQMPEKYWEIFSNAKKNGYAGYIEGKVSQEDFYRYIKPILSRLKGGDEFLAKIDRDDFLRKQRTFDNGSIPHQIHLKELHAILRRQEKYYPFLAEQKEKIEQLLCFRIPYYVGPLAKGGNSSFAWLKRRSDEPITPWNFKDVVDEEASAQAFIEGMTNYDTYLPEEKVLPKHSPLYEMFTVYNELTKVKYIAENMTKPLYLSAEQKEAIIDHLFKQTRKVTVKDLKEKYFSQIEGLENVDVTGVEGAFNASLGTYNDLLKIIKDKAFLDDEANAEILEEIVLILTLFQDEKLIEKRLAKYANLFEKSVLKKLRKRHYRGWGRLSRQLIDGMKDKASGKTILDFLKDDFANRNFIQLINDSSLDFEKLIDDAQKKAIKRESLTEAVANLAGSPAIKKGILQSLKVVDEIVKVMGHNPDNIVIEMSRENQTTAQGLKNARQRLKKIKEVHKKTGSRILEDNSERITNLTLQDNRLYLYLLQDGKDMYTGQDLDINNLSQYDIDHIIPQSFIKDNSIDNLVLTTQKANRGKSDNVPSIEVVRDMKDRVWRRQLANGAISRQKFDHLTKAERGGLADSDKARFLRRQLVETRQITKHVAQLLDSRFNSKSNQNKKLARNVKIITLKSKIVSDFRKDFGLYKLREVNNYHHAHDAYLNAVVGTALLKKYPKLEAEFVYGDYKHFDLSDPSLGKATAKVFFYSNIMNFFKEELSLADGTLMKRPVIETNTETGEVVWDKVKDFKTIRKVLSYPQVNIVKKTEIQSGAFSKESVLSKGNSDKLIERKKGWDPKKYGGFDSPNTAYSIFVVAKVAKRKAQKLKTVKEIVGITIMEQAEYEKDNIAFLEKKGYQDIQEKLLIKLPKYSLFELENGRRRLLASEFQKGNELALSGKYMKFLYLASRYDKLSSKIESEQQKKLFVEQHLHYFDEILDIVVKHATCYIKAENNLKKIISLYKKKEAYSINEQALNMLNLFIFTSLGAPSTFVFFDETIDRKRYTTSSDVLNGILIQQSITGLYETRIDLSRFGGD

SEQ ID NO: 180 - protein, 1359 aa, Streptococcus sanguinis
KKPYSIGLDIGTNSVGWAVVTDDYKVPAKKMRVFGDTDRSHIKKNLLGTLLFDDGNTAESRRLKRTARRRYTRRRNRILYLQEIFTESMNEIDESFFHRLDDSFLVPEDKRGSKYPIFATLQEEKEYHKQFPTIYHLRKQLADSKEKSDVRLIYLALAHMIKYRGHFLYEETFDIKNNDIQKIFNEFINIYDNTFEGSSLSGQNAQVEAIFTDKISKSAKRERVLKLFPDEKSTGLFSEFLKLIVGNQADFKKHFDLEEKAPLQFSKDTYDEELENLLGQIGDDFADLFLIAKKLYDAILLSGILTVTDPSTKAPLSASMIERYENHQKDLAALKQFIKNNLPEKYVEVFSDQSKDGYAGYIDGKTTQEAFYKYIKNLLSKFEGADYFLDKIEREDFLRKQRTFDNGSIPHQIHLQEMNAILRRQGEHYPFLKENREKIEKILTFRIPYYVGPLARDNRDFSWLTRNSDEPIRPWNFEEVVDKARSAEDFIHRMTNYDLYLPEEKVLPKHSLLYETFAVYNELTKVKFIAEGLRDYQFLDSGQKKQIVNQLFKEKRKVTEKDIIHYLHNVDGYDGIELKGIEKQFNANLSTYHDLLKITKDKEFMDDPKNEEILENIVHTLTIFEDREMIKQRLAQYDTLFDEKVIKALTRRHYTGWGKLSAKLINGIRDKQSGKTILDYLIDDDKINRNFMQLINDDGLSFKEIIQKAQVVGKTDDVKQVVQELPGSPAIKKGILQSIKIVDELVKVMGYALESIVIEMARENQTTARGKKNSQQRYKRIEDALKNLAPNILKENPTDNIQLKNDRLFLYYLQNGKDMYTGKPLDINQLSSYDIDHIIPQAFIKDDSIDNRVLTSSKDNRGKSDNVPSLEVVQKRKAFWQQLLDSKLISERKFNNLTKAERGGLDERDKVGFIRRQLVETQQITKNVAQILDARFNTEVKEKNQKIRTVKIITLKSNLVSNFRKEFGLYKVREINNYHHAHDAYLNAVVAKAILKKYPKLEPEFVYGDYQKYDLFKPSKEIEKATEKYFFYSNLLNFFKEEVLYADGTIRKRENIEYSKDTGEIAWDKEKDFATIKKVLSYPQVNIVKKREVQTGGFSKESILPKGNSDKLIPRKTKDILWDTTKYGGFDSPVIAYSILLIADIEKGKAKKLKTVKTLVGITIMEKAAFEENPITFLENKGYHNVRKENILCLPKYSLFELENGRRRLLASAKELQKGNEIVLPVCLTTLLYHSKNLHKLDEPEHLEYIQKHRNEFKDLLNLVSEFSQKYILAEANLEKIKDLYADNEQADIEILANSFINLLTFTALGAPAAFKFFGKDVDRKRYTTVSEILNATLIHQSITGLYETRIDLSKLGEE

SEQ ID NO: 181 - protein, 1362 aa, Streptococcus sanguinis
KKPYSIGLDIGTNSVGWAVITDDYKVPSKKMKVLGNTDKHFIKKNLIGALLFDEGTTAEDRRLKRTSRRRYTRRKNRLRYLQEIFSEEISKLDSSFFHRLDDSFLVPEDKRGSKYPIFATLEEEKEYHKKFPTIYHLRKHLADSKEKTDLRLIYLALAHMIKYRGHFLYEESFDIKNNDIQKIFNEFISIYDNTFEGSSLSGQNAQVEAIFTDKISKSTKRERVLKLFSDEKSTGLFSEFLKLIVGNQADFKKHFDLEEKAPLQFSKDTYDEDLENLLGQIGDGFADLFLVAKKLYDAILLSGILTVTDPSTKAPLSASMIERYENHQEDLAALKQFIKNNLSEKYAEVFSDQSKDGYAGFIDGKTTQEAFYKYIKNLLSKLEGADYFLNKIEREDFLRKQRTFDNGSIPHQIHLQEMNAILRRQGEHYLFLKENREKIEKILAFRIPYYVGPLARGNRDFAWLTRNSDQAIRPWNFEEVVDKASSAEDFINKMTNYDLYLPEEKVLPKHSLLYETFAVYNELTKVKFIAEGLRDYQFLDSGQKKQIVNQLFKDKRKVTEKDIIHYLHNVDGYDGIELKGIEKQFNASLSTYHDLLKIIKDKEFMDNPKNGEILENIIHTLTIFEDREMIKQRLAQYDTLFDEKVIKALTRRHYTGWGKLSAKLINGIRDKQTGKTILEYLIDDGDCNRNFMQLINDDGLSFKEIIQKAQVVGKTDDVKQVVQEIPGSPAIKKGILQSIKIVDELVKVMGHNPESIVIEMARENQTTAKGKKNSQQRYKRIEDALKNLAPNILKENPTDNIQLQNDRLFLYYLQNGKDMYTGKAIDINQLSNYDIDHIIPQAFIKDDSLDNRVLTSSKDNRGKSDNVPSIEVVQKRKAFWQQLLDSKLISERKFNNLTKAKRGGLDERDKVGFIKRQLVETRQITKHVAQLLDTRFNTEVNEENQKIRTVKIITLKSNLVSNFRKEFGLYKVREINDYHHAHDAYLNAVVAKAILKKYPKLEPEFVYGDYQKYDLSKASNTIDKATEKYFFYSNLLNFFKEKVRYADGTIKKRENIEYSNDTGEIAWNKEKDFATIKKVLSLPQVNIVKKTEEQTGGLFDNNIVSKKKVVDASKLIPIKSSLSPEKYGGYARPTIAYSVLVIADIEKGKGKAKKLKRIKEIVGITIQDKKKFESNPVTYLEECGYKNINSNLIIKLPKYSLFEFNDGQRRLLASSIELQKGNELILPYHLTALLYHAQRINKISEPIHKQYVEAHQNEFKELLTTIISLSKKYIQKPNVELLLQQAFDQADKDIYQLSESFISLLKLTSFGAPGAFKFLGVEISQSSVRYKPNSQFLDTTLIHQSITGLYETRIDLSKLGED

SEQ ID NO: 182 - protein, 1360 aa, Streptococcus sp. F0441
ENKNYSIGLDIGTNSVGWSVITDDYKVPSKKMKVLGNTDKHFIKKNLIGALLFDEGTTAEARRLKRTARRRYTRRKNRLRYLQEIFSEEIGKVDSSFFHRLDDSFLIPEDKRGSKYPIFATLAEEKKYHKQFPTIYHLRKQLADSKEKTDLRLIYLALAHMIKYRGHFLYEEAFDIKNNDIQKIFNEFISIYNNTFEGNSLSGQNVQVEAIFTDKISKSAKRERVLKLFPDEKSTGLFSEFLKLIVGNQADFKKHFDLEEKAPLQFSRDTYDEDLENLLGQIGDDFADLFLVAKKLYDAILLSGILTVTNPSTKAPLSASMIERYENHQKDLASLKQFIKNNLPEKYDEVFSDQSEDGYAGYIDGKTTQETFYKYIKNLLSKFEGADYFLDKIEREDFLRKQRTFDNGSIPHQIHLQEMNAILRRQGEHYPFLKENKEKIEKILTFRIPYYVGPLARGNRDFAWLTRNSDQAIRPWNFEEIVDKASSAEDFINKMTNYDLYLPEEKVLPKHSLLYETFAVYNELTKVKFIAEGLRDYQFLDSGQKKQIVTQLFKEKRKVTEKDIIQFLHNVDGYDGIELKGIEKQFNASLSTYHDLLKIIKDKAFMDDAKNEAILENIVHTLTIFEDREMIKQRLAQYDSLFDEKVIKALTRRHYTGWGKLSAKLINGISDKQTGNTILDYLIDDGEINRNFMQLINDDGLSFKEIIQKAQVVGKTNDVKQVVQELPGSPAIKKGILQSIKIVDELVKVMGHAPESIVIEMARENQTTARGKKNSQQRYKRIEDSLKILASKILKEHPTDNIQLQNDRLFLYYLQNGKDMYTGEALDINQLSSCDIDHIIPQAFIKDDSLDNRVLTSSKDNRGKSDNVPSLEVVDKMKVFWQQLLDSKLISYRKFNNLTKAERGGLNELDKVGFIKRQLVETRQITKHVAQILDARFNKEVTEKDKKNRTVKIITLKSNLVSNFRKEFELYKVREINDYHHAHDAYLNAVVAKAILKKYPKLEPEFVYGDYQKYDLSKDPKEIEKATEKYFFYSNLLNFFKEEVHYADGTIVKRENIEYSKDTGEIAWNKEKDFATIKKVLSLPQVNIVKKREVQTGGFSKESILPKGNSDKLIPRKTKDILWDTTKYGGFDSPVIAYSILLIADIEKGKAKKLKTVKTLVGITIMEKDAFEKNPIAFLENKGYHNVCKENILCLPKYSLFELENGRRRLLASAKELQKCNEIVLPVYLTTLLYHSKNVHKLDEPGHLEYIQKHRNEFKDLLNLVSEFSQKYVLADANLEKIKNLYADNEQADIEILANSFINLLTFTALGAPAAFKFFGKDVDRKRYTTVSEILNATLIHQSITGLYETRIDLSKLGED

SEQ ID NO: 183 - protein, 1360 aa, Streptococcus sp. FF10
MKKPYSIGLDIGTNSVGWSVVTDDYKVPAKKMKVLGNTDKEYIKKNLIGALLFDSGETAEATRMKRTARRRYTRRRNRILYLQDIFSPELNQVDESFLHRLDDSFLVAEDKRGERHVIFGNIADEVKYHKEFPTIYHLRKHLADSSEKADLRLVYLALAHIIKYRGHFLIDEPIDIRNMNSQNLFKEFLLAFDGIQVDCYLASKHTDISGIITAKISKSRKVEAVLEQFPDQKKNSFFGNMVSLVFGLMPNFKSNFELDEDAKLQFSRDSYDEDLENLLGIIGDEYADVFVAAKKVYDSILLSGILTTNNHSTKAPLSASMIDRYDEHNSDKKLLRDFIRTNIGKEVFKEVFYDTSKNGYAGYIDGKTNQEDFYKYLKNLLQKVDGGDYFIEKIEREDFLRKQRTFDNGSIPHQVHLDEMKAILRRQGEFYPFLKENAEKIQQILTFKIPYYVGPLARGNSRFAWASYNSNEKMTPWNFDNVIDKTSSAQAFIERMTNNDLYLPDQKVLPKHSLLYQKFAVYNELTKIKYVTETGEARLFDVFLKKEIFDGLFKKERKVTKKKILNFLDKNFDEFRITDIQGLDNETGNFNASYGTYHDLLKIIGDKEFMDSSDNVDVLEDIVLSLTLFEDREMIKQRLLKYEDIFSKKVIANLTRRHYTGWGRLSAKLINGIKDKHSRKTILDYLIDDGHSNRNFMQLINDDNLSFKDEIANSQVIGDGDDLHQVVQELAGSPAIKKGILQSLKIVDELVKVMGYNPEQIVVEMARENQTTARGRNNSQQRLGSLTKAIQDFGSDILKRYPVENNQLQNDQLYLYYLQNGKDMYTGDTLDIHNLSQYDIDHIIPQSFIKDNSLDNRVLTNSKSNRGKSDNVPSNEVVKRMKGFWLKQLDAKLISQRKFDNLTKAERGGLSAEDKAGFIKRQLVETRQITKHVARILDERFNRDFDKNDKRIRNVKIVTLKSNLVSNFRKEFGFYKVREINNFHHAHDAYLNAVVAKALLIRYPKLEPEFVYGEYPKYNSYRERKATEKMFFYSNIMNMFKTTIKLADGRVVEKPVIEANEETGEIAWDKTKHFANVKKVLSYPQVSIVKKVEEQTGGFSKESILPKGGSDKLIARKTKNNYLSTQKYGGFDSPTVAYSIMFVADIEKGKSKRLKTVKEMIGITIMERSRFESNSVTFLEEKGYRNIRENTIIKFPKYSLFELENGRRRLLASAIELQKGNEMFLPQQFVNLLYHAQHANKEDSVIYLEKHRHELSELFHHIIGVSEKTILKPKVEMTLNEAFEKHFEFDEVSELAQSFISLLKFTAFGAPGGFKFLDADIKQSNLRYQTVTEVLSSTLIHQSVTGLYETRIDLSKLGGE

SEQ ID NO: 184 - protein, 1364 aa, Streptococcus sp. M334
SNKSYSIGLDIGTNSVGWAVITDDYKVPSKKMKVLGNTDKHFIKKNLIGALLFDEGTTAEDRRLKRTARRRYTRRKNRLRYLQEIFSQEISKVDSSFFHRLDDFFLVPEDKRGSKYPIFATLVEEKEYHKKFPTIYHLRKHLADSKEKTDLRLIYLALAHMIKYRGHFLYEESFDIKNNDIQKIFSEFISIYDNTFEGKSLSGQNAQVEAIFTDKISKSTKRERVLKLFPDEKSTGLFSEFLKLIVGNQADFKKHFDLEEKAPLQFSKDTYDEDLENLLGQIGDDFADLFLVAKKLYDAILLSGILTVKDLSTKAPLSASMIERYENHQKDLAALKQFIQNNLQEKYDEVFSDQSKDGYAGYIDGKTTQEAFYKYIKNLLSKFEGADYFLDKIEREDFLKKQRTFDNGSIPHQIHLQEMNAIIRRQGEHYPFLQENKEKIEKILTFRIPYYVGPLARGNGDFAWLTRNSDQAIRPWNFEEIVDQASSAEDFINKMTNYDLYLPEEKVLPKHSLLYETFAVYNELTKVKFIAEGLTRYQFLDKKQKKDIFDTFFKAENKRKVTEKDIIHYLHNVDGYDGIELKGIEKQFNASLSTYHDLLKIIKDKAFMDDSKNEEILENIIHTLTIFEDREMIKQRLAQYDSLFDEKVIKALTRRHYTGWGKLSAKLINGIRDKKSGKTILDYLIDDGEINRNFMQLIHDDGLSFKEIIQKAQVFGKTNDVKQVVQELPGSPAIKKGILQSIKIVDELVKVMGHAPESIVIEMARENQTTARGKKNSQQRYKRIEDSLKNLASNILKENPTDNIQLQNDRLFLYYLQNGRDMYTGKPLEINQLSNYDIDHIIPQAFIKDDSLDNRVLTSSKDNRGKSDNVPSLEVVEKMKAFWQQLLDSKLISERKFNNLTKAERERGGLNELDKVGFIKRQLVETRQITKHVAQFLDARFNKEVTEKDKKNRNVKIITLKSNLVSNFRKEFGLYKVREINDYHHAHDAYLNAVLAKAILKKYPKLEPEFVYGDYQKYDLSREPKEVEKATQKYFFYSNLLNFFKEEVHYADGTIVKRENIEYSKDTGEIAWNKEKDFATVKKVLSLPQVNIVKKTEVQTGGFSKESILPKGNSDKLIPRKTKEILWDTTKYGGFDSPVIAYSILLIADIEKGKAKKLKTVKTLVGITIMEKATFEKNPITFLENKGYHNVRKENILCLPKYSLFELESGRRRMLASAKELQKGNEIVLPVYLTTLLYHSKNVHKLDEPEHLEYIQKHRYEFKDLLNLVSEFSQKYVLADANLEKIKNLYADNEQADIEILANSFINLLTFTALGAPAAFKFLGKDVDRKRYTTVSEILNATLIHQSITGLYETRIDLSKLGED

SEQ ID NO: 185 - protein, 1360 aa, Streptococcus sp. taxon 056
NNNNYSIGLDIGTNSVGWAVITDDYKVPSKKMRVLGNTDKRFIKKNLIGALLFDEGTTAEDRRLKRTARRRYTRRKNRLRYLQEIFAEEMSKVDSSFFHRLDDSFLVPEDKSGSKYPIFATLAEEKEYHKKFPTIYHLRKHLADSKEKADLRLIYLALAHITKYRGHFLYEEAFDIKNNDIQKIFNEFINIYDNTFEGSSLSGQNAQVEAIFTGKISKSVKREHVLKLFPDEKSTGLFSEFLKLIVGNQADFKKHFDLEEKASLQFSKDTYDEDLENLLGQIGDDFADLFLVAKKLYDAILLSGILTVTDPSTKAPLSASMIERYENHQEDLAALKQFIKNNLPEKYAEVFSDQSKDGYAGYIDGKTTQEAFYKYIKNLLSKFEGADYFLDKIEREDFLRKQRTFDNGSIPHQIHLQEMNAILRRQGEHYPLLKENKEKIEKILTFRIPYYVGPLARGNRDFAWLTRNSDQAIRPWNFEEIVDKASSAESFINKMTNYDLYLPEEKVLPKHSLLYETFAVYNELTKVKFIAEGLRDYQFFDSGQKKQIVNQLFKEKRKVTEKDIIHYLHNVDGYDGIELKGIEKQFNASLSTYHDLLKIIKDKEFMDNHKNQEILENIVHTLTIFEDREMIKQRLAQYDSIFDEKVIKALTRRHYTGWGKLSAKLINGICDKKTGKTILDYLIDDGYNNRNFMQLINDDGLSFKEIIQKAQVVGKTDDLTQVVRELSGSPAIKKGILQSIKIVDELVKIMGYAPESIVIEMARENQTTAKGKKNSQQRYKRIEDALKNLAPTISKENPTDNIQLQNDRLFLYYLQNGKDMYTGEALDINQLSSYDIDHIIPQAFIKDDSLDNRVLTSSKDNRGKSDNVPSLEVVKKRKAFWQQLLDSKLISERKFNNLTKAERGGLDERDKVGFIKRQLVETRQITKHVARILDARFNTEVSEKNQKIRSVKIITLKSNLVSNFRKEFKLYKVREINDYHHAHDAYLNAVVAKAILKKYPKLEPEFVYGDYQKYDLSKDPKEVEKATEKYFFYSNLLNFFKEEVHYADGTIVKRENIEYSKDTGEIAWNKEKDFVTIKKVLSYPQVNIVKKREVQTGGFSKESILPKGNSDKLIPRKTKDILWDTTKYGGFDSPVIAYSILLIADIEKGKAKKLKTVKTLVGITIMEKAAFEKNPITFLENKGYHNVRKENILCLPKYSLFELENGRRRLLASAKELQKGNEIVLPVYLTTLLYHSKNVHKLDEPEHLEYIQKHRYEFKDLLNLVSEFSQKYVLAEANLEKIKSLYVDNEQADIEILANSFINLLTFTALGAPAAFKFFGKDVDRKRYTTVSEILNATLIHQSITGLYETRIDLSKLGED

SEQ ID NO: 186 - protein, 1359 aa, Streptococcus suis
MKKKYAIGIDIGTNSVGWSVVTDDYKVPSKKMKVFGNTEKRYIKKNLLGTLLFDEGNTAENRRLKRTARRRYTRRRNRILYLQEIFAEEINKIDDSFFQRLDDSFLIVEDKQGSKHPIFGTLQEEKKYHKQFPTIYHLRKQLADSSQKADIRLIYLALAHIIKYRGHFLFEGDLKSENKDVQHLFNDFVEMFDKTVEGSYLSENLPNVADVLVEKVSKSRRLENILHYFPNEKKNGLFGNFLALALGLQPNFKTNFELAEDAKIQFSKETYEEDLEELLGKIGDDYADLFIATKSLYDGILLAGILSTTDSTTKAPLSSSMVNRYEEHKKDLALLKNFIHQNLSDSYKEVFNDKLKDGYAGYIEGKTTQENFYRFIKKAIEKIEGSDYFIDKIDREDFLRKQRTFDNGSIPHQIHLQEMHAIIRRQAEFYPFLVENQDKIEKILTFRIPYYVGPLARGKSEFAWLNRKSDEKIRPWNFDEMVDKETSAENFITRMTNYDQYLPDQKVLPKHSLLYEKFAVYNELTKVKFIAEGMRDYQFLDSGQKKDIVKTLFKTKRKVTAKDIKAYLENSNGYAGVELKGLEEQFNASLPTYHDLLKILRDKAFIDAEENQEILEDIVLTLTLFEDREMIRKRLEKYKDILTEEQRKKLERRHYTGWGRLSAKLINGILDKVTRKTILGYLIDDGTSNRNFMQLINDDTLSFVDEIRLAQGSGEAEDYRAEVQNLAGSPAIKKGILQSLKIVDELIEVMGYDPEHIVVEMARENQFTNQGRRNSQQRYKKIENAIKNLNSKILKEYPTNNQALQNDRLFLYYLQNGKDMYTDEELDIDQLSQYDIDHIIPQAFIKDDSLDNKVLTKSAKNRGKSDDVPSLEIVHKKKNFWKQLLDSQLISQRKFDNLTKAERGGLTNEDKARFIQRQLVETRQITKHVARILDTRFNTKLDEAGNRIRDPKVNIITLKSNLVSQFRKDYQLYKVREINNYHHAHDAYLNAVVATALLKKYPQLAPEFVYGDYPKYNSYKSRKATEKVLFYSNIMNFFRRVLVYSKTGEVRIRPVIEVNKETGEIVWDKKSDFRTVRKVLSYPQVNVVKKVEMQTGGFSKESILQHGDSDKLIPRKTEKFYLDTKKYGGFDSPTIAYSVLLIADIEKGKAKKLKRVKELIGITIMERMAFEKNPIEFLEHKGYKNILEKNIIKLPKYSLFELENGRRRLLASAKELQKGNEMILPPHLVTLLYHSSNIHKITEPIHLNYVNKNKHEFKELLRHISDFSTRYILAQDRLSKIEELYDKNDGDDISDLTSSFVNLLTFTAIGAPAAFKFLGSVIDRKRYTSIAEILEATLIHQSVTGLYETRIDLSKLGGD

SEQ ID NO: 187 - protein, 1361 aa, Streptococcus suis
MKKKYAIGIDIGTNSVGWSVVTDDYKVPSKKMKVFGNTEKRYIKKNLLGTLLFDEGNTAENRRLKRTARRRYTRRRNRILYLQEIFAEEINKIDDSFFQRLDDSFLIVEDKQGSKHPIFGTLQEEKEYHKQFPTIYHLRKQLADSSQKADIRLIYLALAHIIKYRGHFLFEGDLKSENKDVQHLFNDFVEMFDKTVEGSYLSENLPNVADVLVEKVSKSRRLENILHYFPNEKKNGLFGNFLTLALGLQPNFKTNFELAEDAKIQFSKETYEEDLEELLGKIGDDYADLFIATKSLYDGILLAGILSTTDSTTKAPLSSSMVNRYEEHQKDLALLKNFIHQNLSDSYKEVFNDKLKDGYAGYIEGKTTQENFYRFIKKAIEKIEGSNYFIDKIDREDFLRKQRTFDNGSIPHQIHLQEMHAIIRRQAEFYPFLVENQDKIEKILTFRIPYYVGPLARGKSEFAWLNRKSDEKIRPWNFDEMVDKETSAENFITRMTNYDQYLPDQKVLPKHSLLYEKFAVYNELTKVRYVTEQGKSFFFDANMKQEIFDGVFKVYRKVTKEKLMDFLGKEFDEFRIVDLLGLDKDNKSFNASLGTYHDLKKIVSKDLLDNPENEDILENVVLTLTLFEDREMIRKRLEKYKDVLTEEQRKKLERRHYTGWGRLSAKLINGIRDKVTRKTILDYLIDDGTSNRNFMQLINDDTLSFVDEIRLAQGSGEAEDYRAEVQNLAGSPAIKKGILQSLKIVDELIEVMGYDPEHIVVEMARENQFTNQGRRNSQQRYKKIENAIKNLNSKILKEYPTNNQALQNDRLFLYYLQNGKDMYTDEELDIDQLSQYDIDHIIPQAFIKDDSLDNKVLTKSAKNRGKSDDVPSLEIVHKKKNFWKQLLDSQLISQRKFDNLTKAERGGLTNEDKARFIQRQLVETRQITKHVARILDTRFNTKLDEAGNRIRDPKVNIITLKSNLVSQFRKDYQLYKVREINNYHHAHDAYLNAVVATALLKKYPQLAPEFVYGDYPKYNSYKSRKATEKVLFYSNIMNFFRRVLVYSKTGEVRIRPVIEVNKETGEIVWDKKSDFRTVRKVLSYPQVNVVKKVEMQTGGFSKESILQHGDSDKLIPRKTEKFYLDTKKYGGFDSPTIAYSVLLIADIEKGKAKKLKRVKELIGITIMERMAFEKNPIEFLEHKGYKNILEKNIIKLPKYSLFELENGRRRLLASAKELQKGNEMILPPHLVTLLYHSSNIHKITEPIHLNYVNKNKHEFKELLRHISDFSTRYILAQDRLSKIEELYDKNDGDDISDLTSSFVNLLTFTAIGAPAAFKFLGSVIDRKRYTSIAEILEATLIHQSVTGLYETRIDLSKLGGD

SEQ ID NO: 188 - protein, 1361 aa, Streptococcus suis
MKKKYAIGIDIGTNSVGWSVVTDDYKVPSKKMKVFGNTEKRYIKKNLLGTLLFDEGNTAENRRLKRTARRRYTRRRNRILYLQEIFAEEINKIDDSFFQRLDDSFLIVEDKQGSKHPIFGTLQEEKEYHKQFPTIYHLRKQLADSSQKADIRLIYLALAHIIKYRGHFLFEGDLKSENKDVQHLFNDFVEMFDKTVEGSYLSENLPNVADVLVEKVSKSRRLENILHYFPNEKKNGLFGNFLALALGLQPNFKTNFELAEDAKIQFSKETYEEDLEELLGKIGDDYADLFIATKSLYDGILLAGILSTTDSTTKAPLSSSMVNRYEEHQKDLALLKNFIHQNLSDSYKEVFNDKLKDGYAGYIEGKTTQENFYRFIKKAIEKIEGSNYFIDKIDREDFLRKQRTFDNGSIPHQIHLQEMHAIIRRQAEFYPFLVENQDKIEKILTFRIPYYVGPLARGKSEFAWLNRKSDEKIRPWNFDEMVDKETSAENFITRMTNYDQYLPDQKVLPKHSLLYEKFAVYNELTKVRYVTEQGKSFFFDANMKQEIFDGVFKVYRKVTKEKLMDFLGKEFDEFRIVDLLGLDKDNKSFNASLGTYHDLKKIVSKDLLDNPENEDILENVVLTLTLFEDREMIRKRLEKYKDVLTEEQRKKLERRHYTGWGRLSAKLINGIRDKVTRKTILDYLIDDGTSNRNFMQLINDDTLSFVDEIRLAQGSGEAEDYRAEVQNLAGSPAIKKGILQSLKIVDELIEVMGYDPEHIVVEMARENQFTNQGRRNSQQRYKKIENAIKNLNSKILKEYPTNNQALQNDRLFLYYLQNGKDMYTDEELDIDQLSQYDIDHIIPQAFIKDDSLDNKVLTKSAKNRGKSDDVPSLEIVHKKKNFWKQLLDSQLISQRKFDNLTKAERGGLTNEDKARFIQRQLVETRQITKHVARILDTRFNTKLDEAGNRIRDPKVNIITLKSNLVSQFRKDYQLYKVREINNYHHAHDAYLNAVVATALLKKYPQLAPEFVYGDYPKYNSYKSRKATEKVLFYSNIMNFFRRVLVYSKTGEVRIRPVIEVNKETGEIVWDKKSDFRTVRKVLSYPQVNVVKKVEMQTGGFSKESILQHGDSDKLIPRKTEKFYLDTKKYGGFDSPTIAYSVLLIADIEKGKAKKLKRVKELIGITIMERMAFEKNPIEFLEHKGYKNILEKNIIKLPKYSLFELENGRRRLLASAKELQKGNEMILPPHLVTLLYHSSNIHKITEPIHLNYVNKNKHEFKELLRHISDFSTRYILAQDRLSKIEELYDKNDGDDISDLTSSFVNLLTFTAIGAPAAFKFLGSVIDRKRYTSIAEILEATLIHQSVTGLYETRIDLSKLGGD

SEQ ID NO: 189 - protein, 1359 aa, Streptococcus suis
MKKKYAIGIDIGTNSVGWSVVTDDYKVPSKKMKVFGNTEKRYIKKNLLGTLLFDEGNTAENRRLKRTARRRYTRRRNRILYLQEIFAEEINKIDDSFFQRLDDSFLIVEDKQGSKHPIFGTLQEEKKYHKQFPTIYHLRKQLADSSQKADIRLIYLALAHIIKYRGHFLFEGDLKSENKDVQHLFNDFVEMFDKTVEGSYLSENLPNVADVLVEKVSKSRRLENILHYFPNEKKNGLFGNFLALALGLQPNFKTNFELAEDAKIQFSKETYEEDLEELLGKIGDDYADLFIATKSLYDGILLAGILSTTDSTTKAPLSSSMVNRYEEHKKDLALLKNFIHQNLSDSYKEVFNDKLKDGYAGYIEGKTTQENFYRFIKKAIEKIEGSDYFIDKIDREDFLRKQRTFDNGSIPHQIHLQEMHAIIRRQAEFYPFLVENQDKIEKILTFRIPYYVGPLARGKSEFAWLNRKSDEKIRPWNFDEMVDKETSAENFITRMTNYDQYLPDQKVLPKHSLLYEKFAVYNELTKVKFIAEGMRDYQFLDSGQKKDIVKTLFKTKRKVTAKDIKAYLENSNGYAGVELKGLEEQFNASLPTYHDLLKILRDKAFIDAEENQEILEDIVLTLTLFEDREMIRKRLEKYKDILTEEQRKKLERRHYTGWGRLSAKLINGILDKVTRKTILGYLIDDGTSNRNFMQLINDDTLSFVDEIRLAQGSGEAEDYRAEVQNLAGSPAIKKGILQSLKIVDELIEVMGYDPEHIVVEMARENQFTNQGRRNSQQRYKKIENAIKNLNSKILKEYPTNNQALQNDRLFLYYLQNGKDMYTDEELDIDQLSQYDIDHIIPQAFIKDDSLDNKVLTKSAKNRGKSDDVPSLEIVHKKKNFWKQLLDSQLISQRKFDNLTKAERGGLTNEDKARFIQRQLVETRQITKHVARILDTRFNTKLDEAGNRIRDPKVNIITLKSNLVSQFRKDYQLYKVREINNYHHAHDAYLNAVVATALLKKYPQLAPEFVYGDYPKYNSYKSRKATEKVLFYSNIMNFFRRVLVYSKTGEVRIRPVIEVNKETGEIVWDKKSDFKTVRKVLSYPQVNVVKKVEMQTGGFSKESILQHGDSDKLIPRKTEKFYLDTKKYGGFDSPTIAYSVLLIADIEKGKAKKLKRVKELIGITIMERMAFEKNPIEFLEHKGYKNILEKNIIKLPKYSLFELENGRRRLLASAKELQKGNEMILPPHLVTLLYHSSNIHKITEPIHLNYVNKNKHEFKELLRHISDFSTRYILAQDRLSKIEELYDKNDGDDISDLTSSFVNLLTFTAIGAPAAFKFLGSVIDRKRYTSIAEILEATLIHQSVTGLYETRIDLSKLGGD

SEQ ID NO: 190 - protein, 1351 aa, Streptococcus suis
MDQKYSIGLDIGTNSVGWAVVTDDYKVPAKKMKVLGNTDKQSIKKNLLGALLFDSGETAEATRLKRTARRRYTRRRNRLRYLQEIFAEEMNKVDENFFQRLDDSFLVDEDKRGERHPIFGNIAAEVKYHDDFPTIYHLRKHLADISQKADLRLVYLALAHMIKFRGHFLIEGQLKAENTNVQALFKDFVEVYDKTVEESHLSEMTVDALSILTEKVSKSRRLENLIAHYPAEKKNTLFGNLIALSLGLQPNFKTNFQLSEDAKLQFSKDTYEEDLEGLLGEIGDEYADLFASAKNLYDAILLSGILTVDDNSTKAPLSASMVKRYEEHQKDLKKLKDFIKVNAPDQYNAIFKDKNKKGYAGYIENGVKQDEFYKYLKGILLQINGSGDFLDKIDREDFLRKQRTFDNGSIPHQIHLQEMHAILRRQEEHYPFLKENQDKIEKILTFRIPYYVGPLARKGSRFAWAEYKADEKITPWNFDDILDKEKSAEKFITRMTLNDLYLPEEKVLPKHSLLYETFTVYNELTKVKYVNEQGEAKFFDANMKQEIFDHVFKENRKVTKDKLLNYLGKEFDEFRIVDLTGLDKENKVFNSSLGTYHDLRKILDKSFLDNKENEQIIEDIIQTLTLFEDREMIRQRLQKYSDIFTKAQLKKLERCHYTGWGRLSYKLINGIRNKENKKTILDYLIDDGYANRNFMQLINDDALSFKEEIAKAQVIGETDDLNQVVSDIAGSPAIKKGILQSLKIVDELVKVMGYNPANIVIEMARENQTTDKGRRNSQQRLKLLQDSLKPVNIKNVENQQLQNDRLFLYYIQNGKDMYTGETLDINNLSQYDIDHIIPQAFIKDDSFDNRVLTSSSENRGKSDNVPSIEVVRARKADWMRLRKAGLISQRKFDNLTKAERGGLTENDKAGFIKRQLVETRQITKHVAQVLDARFNAKHDENKKVIRDVKIITLKSNLVSQFRKDFKFYKVREINDYHHAHDAYLNAVIGTALLKKYPKLASEFVYGEFKKYDVSDKEIGKATAKYFFYSNLMNFFKKEVKFADGTVVERPDIETSEDGEIAWNKQTDFKIVRKVLSYPQVNIVKKTEVQTHGLDRPSPKPKPDSSENLVGVKRNLDPKKYGGYAGISNSYAVLVKAIIEKGVKKKETMVLEFQGISILDRITFEKDKRAFLLGKGYKDIKKIIELPKYSLFELKDGSRRMLASRGEIHKGNELFVPQKFTTLLYHAKRINNPINKDHIEYVKKHRDDFKELLNYVLEFNEKYVGATKNGERLKEAVADFDSKSNEEICTSFLGLFELTSLGSASDFEFLGVKIPRYRDYTPSSLLKDSTLIHQSITGLYETRIDLSKLGED

SEQ ID NO: 191 - protein, 1256 aa, Brochothrix thermosphacta
MWGVSLFEAGKTAAERRGYRSTRRRLNHRKFRLRLLEDMFEKEILSKDPSFFIRLKEAFLSPKDEQKQFLFNDKDYTDADYYEQYKTIYHLRYDLISQHRQFDIREVYLAIHHLIKYRGHFIYEDQTFTTDGNQLQHHIKAIITMINSTLNRIIPETIDINVFEKILLDRMMNRSSKVKFLIELTGKQDKPLLKELFNLIVGLKAKPASIFEQENLATIVETMNMSTEQVQLDLLTLADVLADEEYDLLLTAQKIYSAIILDESMDGYEYFAEAKKESYRKHQEELVLVKKMLKSNAITNDERAKFEYFYTDYIGYEESKSKEERLFKHIELLLAKENVLTTVEHALLEKNITFASLLPLQRSSRNAVIPYQVHEKELVAILENQATYYPFLLEQKDNIHKLLTFRIPYYVGPLADQKDSEFAWMVRKQAGKITPFNFEEMVDIDASSEAFIKRMTNKCTYLIHEDVIPKHSFSYAKFEVLNELNKIRLDGKPIDIPLKKRIFEGLFLEKTKVTQTSLKKWLAEHEHMTVSVVQGTQKETEFATSLQAFHRFVKIFDRETVSNPANEEMFEKIIYWSTVFEDKKIMRRKLSEYPQLTEQQQVQLAQVRFRGWGRLSQRLINRIKTPEDHKLSINEILQTNENFMQIIRNKDYLFKKIIEEQFENETALLNKQRIDELAASPANKKGIWQAIKIVKELEKVLQQPAENIFIEFARSDEESKRSTPRDKFIEKAYAETDTEHLKELKQRSKQLSSQRLFLYFIQNGKCMYSGEHLDIERLDSYEVDHILPQSYIKDNSIENLALVKKVENQRKKDSLLLNSSIINQNYSRWEQLKNAGLIGEKKFRNLTRTKITDRDKEGFIARQLVETRQITKHVTQLLQQEYKDTTKVFAIKATLVSGLRRKFEFIKNRNVNDYHHAQDAFLVAFLGTNITSNYPKIEMEYLFKGYQHYLNEVGKAAKPKFTFIVENLSKQQNSTTGEVKWNPEVDIAKLKRILNFKQCNIVRKVEEQSGALFKETIYPVEESSSKTIPLKKHLDTAIYGGYTAVNYASYALIQFKKGRKLKREIIGIPLAVQTRIDNSETSLQAYIAEQIKSEVEILNGRILKYQLISNNGNRLYIAGSERHNARQLIVSDEAAKVIWLISTKQADEAMFLKYYRLEHLEAVFEELIRKQAADYQIFEKLIKKIEVNFYSCTYNEKVKVIELLKITQANATNGDLKLLKMSNREGRLGSVSVALDFKIINQSVTGLYQSIEDYNN

SEQ ID NO: 192 - protein, 1290 aa, Catenibacterium mitsuokai
IVDYCIGLDLGTGSVGWAVVDMNHRLMKRNGKHLWGSRLFSNAETAANRRASRSIRRRYNKRRERIRLLRAILQDMVLEKDPTFFIRLEHTSFLDEEDKAKYLGDNYNLFIDEDFNDYTYYHKYPTIYHLRKALCESTEKADPRLIYLALHHIVKYRGNFLYEGQKFNMDASNIEDKLSDIFTQFTSFNNIPYEDDKKNLEILEILKKPLSKKAKVDEVMTLIAPEKDYKSAFKELVTGIAGNKMNVTKMILCEPIKQGDSEIKLKFSDSNYDDQFSEVEKDLGEYVEFVDALHNVYSWVELQTIMGATHTDNASISEAMVSRYNKHHDDLKLLKDCIKNNVPNKYFDMFRNDSEKSKGYYNYINRKAPVDEFYKYVKKCIEKVDTPEAKQILNDIELENFLLKQNSRTNGSVPYQMQLDEMIKIIDNQAEYYPILKEKREQLLSILTFRIPYYFGPLETSEHAWIKRLEGKENQRILPWNYQDIVDVDATAEGFIKRMRSYCTYFPDEEVLPKNSLIVSKYEVYNELNKIRVDDKLLEVDVKNDIYNELFMKNKTVTEKKLKNWLVNNQCCSKDAEIKGFQKENQFSTSLTPWIDFTNIFGKIDQSNFDLIENIIYDLTVFEDKKIMKRRLKKKYALPDDKVKQILKLKYKDWSRLSKKLLDGIVADSVTVLDVLESRLNLMEIINDKDLGYAQMIEEATSCPEDGKFTYEEVERLAGSPALKRGIWQSLQIVEEITKVMKCRPKYIYIEFERSEEKERTESKIKKLENVYKDEQTSVLEELKGFDNTKKISSDSLFLYFTQLGKCMYSGKKLDIDSLDKYQIDHIVPQSLVKDDSFDNRVLVVPSENQRKLDDLVVPFDIRDKMYRFWKLLFDHELISPKKFYSLIKTEYTERDEERFINRQLVETRQITKNVTQIIEDHYSTTKVAAIRANLSHEFRVKNHIYKNRDINDYHHAHDAYIVALIGGFMRDRYPNMHDSKAVYSEYMKMFRNKNDQKGFVINSMNYPYEVDGKLIWNPDLINEIKKCFYYKDCYCTTKLDQKSGQLFNTVLSNDAHADKGAVVPVNKNRSDVHKYGGFSGLQYTIVAIEGQKKKGKKTELVKKISGVPLHLKAASINEKINYIEEKEGLSDVRIIKDNIPVNQMIEMDGGEYLLTSEYVNARQLVLNEKQCALIADIYNAIYKQDYDNLDDILMIQLYIELTNKMKVLYPAYRGIAEKFESYVVISKEEKANIIQMLIVMHRGPQNGNIVYDDFKISDRIGRLKTKNHNLNIVFISQSPTGIYTKKYKL

SEQ ID NO: 193 - protein, 1359 aa, Artificial Sequence; identical to SEQ ID NO: 11
  Synthetic Polypeptide

SEQ ID NO: 194 - protein, 1317 aa, Clostridiales bacterium S5-A11
MKNYTIGLDIGTNSVGWAVIKDDLTLVRKKIKISGNTDKKEVKKNLWGSFLFEQGDTAQDTRVKRIARRRYERRRFRIRELQKIFDKSMGEVDSNFFHRLDESFLVEEDKEYSKYPIFSNEKEDKNYYDKYPTIYHLRKDLADSNQKADLRLIYLALAHMIKYRGHFLIEGDLKMDGISISESFQEFIDSYNEVCALEDENNDELLTQIENIFKQDISRSKKLDQAIALFQGKRQSLFGIFLTLIVGNKANFQKIFNLEDDIKLDLKEEDYDENLEELLSNIDEGYRDVFLQAKNVYNAIELSKILKTDGKETKAPLSAQMVELYNQHREDLKKYKDYIKAYLPEKYGETFKDATKNGYAGYIDGKTSQEDFYKFVKAQLKGEENGEYFLEAIENENFLRKQRSFYNGVIPYQIHLQELTAVLDQQEKHYSFLKENRDKIISLLTFRIPYYVGPLAKGESRFAWLERSNSEEKIKPWNFDKIVDIDKSAELFIENLTSRDTYLPDEPVLPKRSLIYQKFTIFNELTKISYIDERGILQNFSSREKIAIFNDLFKNKSKVTKNQLVKYIENKEQIIAPEIKGIEDSFNSNYSTYIDLSKIPDMKLLEKDEDEILEEIIKILTIFEDRKMRKRQLMKFKDKLSEKAINQLSKKHYTGWGQLSEKLINGIRDEQSNKTILDYLIDNGCPKNMNRNFMQLINDDTLSFKEKIRKAQDINQVNDIKEIVKDLPGSPAIKKGIYQSIRIVDEIIRKMKDRPKNIVIEMARENQTTQEGKNKSKARLKKIQEGLENLDSHVEKQALDEEMLKSPKYYLYCLQNGKDIYTGKDLDIGQLQTYDIDHIIPRSFITDNSFDNLVLTSSTVNRGKLDNVPSPDIVRQQKGFWKQLLRAGLMSQRKFNNLTKGKLTDRDRQQFINRQLVETRQITKHVANLLSHHLNEKKEVGEINIVLLKSALTSQFRKKFDFYKVREVNDYHHAHDAYLNGVIALKLLELYPYMAKDLIYGKYSYHRKGDKATQAKYKMSNIIERFSQDLLANPDGEIAWEKDKDLNTIRKVLSSKQINIIKKAEEGKGRLFKETINSRPSKKTEKRIPIKNNLDPNIYGGYIEEKMAYYIAINYLENGKTKKAIVGISIKDKKDFEGQTTEYLGKIGFNKASIINSFKNYTLFELENGSRRMIVGKGELQKGNQMYLPQNLLEFVYHLKHYNEDETSHKFIVEHKAYFDELLNYIVEFANKYLELENSIEKIKDLYHGKGPDVEEKELVESFINLLAITKCGPAADITFLGEKISRKRYRSTNCLWGSEVIFQSPTGLYETRLRLE

SEQ ID NO: 195 - protein, 1359 aa, Artificial Sequence; identical to SEQ ID NO: 11
  Synthetic Polypeptide

SEQ ID NO: 196 - protein, 1327 aa, Dolosigranulum pigrum
MQKNYTIGLDIGTNSVGWAVMKDDYTLIRKRMKVLGNTDIKKIKKNFWGVRLFDEGETAKETRLKRGTRRRYQRRRNRLIYLQDIFQQPMLAIDENFFHRLDDSFFVPDDKSYDRHPIFGSLEEEVAYHNTYPTIYHLRKHLADNPEKADLRLVYTALAHIVKYRGHFLIEGELNTENTSISETFEQFLDTYSDIFKEQLVGDISKVEEILSSKQSRSRKHEQIMALFPNENKLGNFGRFMMLIVGNTSNFKPVFDLDDEYKLKLSDETYEEDLDTLLGMTDDVFLDVFMAAKNVYDAVEMSAIISTDTGNSKAVLSNQMINFYDEHKVDLAQLKQFFKTHLPDKYYECFSDPSKNGYAGYIDGKTNQEDFYKYIEKVMKTIKSDKKDYFLDKIDREVFLRKQRSFYNSVIPHQIHLQEMQAILDRQSQYYPFLAENRDKIESLVTFRIPYYVGPLTVSDQSEFAWMERQSDEPIRPWNFDEIVNKERSAEKFIERMTNMDTYLLEEKVLPKRSLLYQTFEVYNELTKVRYTNEQGKTEKLNRQQKAEIIETLFKQKNRVREKDIANYLEQYGYVDGTDIKGVEDKFNASLSTYNDLAKIDGAKAYLDDPEYADVWEDIIKILTIFEDKAMRKKQLQTYSDTLSPEILKKLERKHYTGWGRFSKKLINGLRDEGSNKTILDYLKDEGSSGPTNRNFMQLIRDNTLSFKKKIEDAQTIEDTTHIYDTVAELPGSPAIKKGIRQALKIVEEIIDIIGYEPENIVVEMARESQTTKKGKDLSKERLEKLTEAIKEFDGVKVKDLKNENLRNDRLYLYYLQNGRDMYTNEPLDINNLSKYDIDHIIPQSFTTDNSIDNKVLVSRTKNQGNKSDDVPSINIVHKMKPFWRQLHKAGLISDRKFKNLTKAEHGGLTEADRAHFLNRQLVETRQITKHVANLLDSQYNTAEEQRINIVLLKSSMTSRFRKEFKLYKVREINDYHHGHDAYLNAVVATTIMKVYPNLKPQFVYGQYKKTSMFKEEKATARKHFYSNITKFFKKEKVVNEETGEILWDTERHLSTIKRVLSWKQMNIVKKVEKQKGQLWKETIYPKGDSSKLIPVKEGMDPQKYGGLSQVSEAFAVVITHEKGKKKQLKSDLISIPIVDQKAYEQHPTAYLEEAGYNNPTVLHELFKYQLFELEDGSRRMIASAKEFQKGNQMVLPLELVELLYHANRYDKVKFPDSIEYVHDNLAKFDDLLEYVIDFSNKYINADKNVQKIQKIYKEHGTEDVELTVESFVNLMTFTAMGAPATFKFYGESITRSRYTSITEFRGSTLIFQSITGLYETRYKLED

SEQ ID NO: 197 - protein, 1329 aa, Artificial Sequence
  Synthetic Polypeptide
MKKDYVIGLDIGTNSVGWAVMTEDYQLVKKKMPIYGNTEKKKIKKNFWGVRLFEEGHTAEDRRLKRTARRRISRRRNRLRYLQAFFEEAMTDLDENFFARLQESFLVPEDKKWHRHPIFAKLEDEVAYHETYPTIYHLRKKLADSSEQADLRLIYLALAHIVKYRGHFLIEGKLSTENISVKEQFQQFMIIYNQTFVNGESPLPESVLIEEELTEKASRTKKSEKVLQQFPQEKANGLFGQFLKLMVGNKADFKKVFGLEEEAKITYASESYEEDLEGILAKVGDEYSDVFLAAKNVYDAVELSTILADSDKKSHAKLSSSMIVRFTEHQEDLKKFKRFIRENCPDEYDNLFKNEQKDGYAGYIAHAVSQLKFYQYVKKIIQDIAGAEYFLEKIAQENFLRKQRTFDNGVIPHQIHLAELQAIIHRQAAYYPFLKENQEKIEQLVTFRIPYYVGPLSKGDASTFAWLKRQSEEPIRPWNLQETVDLDQSATAFIERMTNFDTYLPSEKVLPKHSLLYEKFMVFNELTKISYTDDRGIKANFSGKEKEKIFDYLFKTRRKVKKKDIIQFYRNEYNTEIVTLSGLEEDQFNASFSTYQDLLKCGLTRAELDHPDNAEKLEDIIKILTIFEDRQRIRTQLSTFKGQFSAEVLKKLERKHYTGWGRLSKKLINGIYDKESGKTILGYLIDDGVSKHYNRNFMQLINDSQLSFKNAIQKAQSSEHEETLSETVNELAGSPAIKKGIYQSLKIVDELVAIMGYAPKRIVVEMARENQTTSTGKRRSIQRLKIVEKAMAEIGSNLLKEQPTTNEQLRDTRLFLYYMQNGKDMYTGDELSLHRLSHYDIDHIIPQSFMKDDSLDNLVLVGSTENRGKSDDVPSKEVVKDMKAYWEKLYAAGLISQRKFQRLTKGEQGGLTLEDKAHFIQRQLVETRQITKNVAGILDQRYNANSKEKKVQIITLKASLTSQFRSIFGLYKVREVNDYHHGQDAYLNCVVATTLLKVYPNLAPEFVYGEYPKFQTFKENKATAKAIIYTNLLRFFTEDEPRFTKDGEILWSNSYLKTIKKELNYHQMNIVKKVEVQKGGFSKESIKPKGPSNKLIPVKNGLDPQKYGGFDSPIVAYTVLFTHEKGKKPLIKQEILGITIMEKTRFEQNPILFLEEKGFLRPRVLMKLPKYTLYEFPEGRRRLLASAKEAQKGNQMVLPEHLLTLLYHAKQCLLPNQSESLAYVEQHQPEFQEILERVVDFAEVHTLAKSKVQQIVKLFEANQTADVKEIAASFIQLMQFNAMGAPSTFKFFQKDIERARYTSIKEIFDATIIYQSTTGLYETRRKVVD

SEQ ID NO: 198 - protein, 1280 aa, Artificial Sequence
  Synthetic Polypeptide
MRLFEEGHTAEDRRLKRTARRRISRRRNRLRYLQAFFEEAMTDLDENFFARLQESFLVPEDKKWHRHPIFAKLEDEVAYHETYPTIYHLRKKLADSSEQADLRLIYLALAHIVKYRGHFLIEGKLSTENTSVKDQFQQFMVIYNQTFVNGESPLPESVLIEEELTEKASRTKKSEKVLQQFPQEKANGLFGQFLKLMVGNKADFKKVFGLEEEAKITYASESYEEDLEGILAKVGDEYSDVFLAAKNVYDAVELSTILADSDKKSHAKLSSSMIVRFTEHQEDLKKFKRFIRENCPDEYDNLFKNEQKDGYAGYIAHAVSQLKFYQYVKKIIQDIAGAEYFLEKIAQENFLRKQRTFDNGVIPHQIHLAELQAIIHRQAAYYPFLKENQEKIEQLVTFRIPYYVGPLSKGDASTFAWLKRQSEEPIRPWNLQETVDLDQSATAFIERMTNFDTYLPSEKVLPKHSLLYEKFMVFNELTKISYTDDRGIKANFSGKEKEKIFDYLFKTRRKVKKKDIIQFYRNEYNTEIVTLSGLEEDQFNASFSTYQDLLKCGLTRAELDHPDNAEKLEDIIKILTIFEDRQRIRTQLSTFKGQFSAEVLKKLERKHYTGWGRLSKKLINGIYDKESGKTILDYLVDDGVSKHYNRNFMQLINDSQLSFKNAIQKAQSSEHEETLSETVNELAGSPAIKKGIYQSLKIVDELVAIMGYAPKRIVVEMARENQTTSTGKRRSIQRLKIVEKAMAEIGSNLLKEQPTTNEQLRDTRLFLYYMQNGKDMYTGDELSLHRLSHYDIDHIIPQSFMKDDSLDNLVLVGSTENRGKSDDVPSKEVVKDMKAYWEKLYAAGLISQRKFQRLTKGEQGGLTLEDKAHFIQRQLVETRQITKNVAGILDQRYNAKSKEKKVQIITLKASLTSQFRSIFGLYKVREVNDYHHGQDAYLNCVVATTLLKVYPNLAPEFVYGEYPKFQTFKENKATAKAIIYTNLLRFFTEDEPRFTKDGEILWSNSYLKTIKKELNYHQMNIVKKVEVQKGGFSKESIKPKGPSNKLIPVKNGLDPQKYGGFDSPVVAYTVLFTHEKGKKPLIKQEILGITIMEKTRFEQNPILFLEEKGFLRPRVLMKLPKYTLYEFPEGRRRLLASAKEAQKGNQMVLPEHLLTLLYHAKQCLLPNQSESLAYVEQHQPEFQEILERVVDFAEVHTLAKSKVQQIVKLFEANQTADVKEIAASFIQLMQFNAMGAPSTFKFFQKDIERARYTSIKEIFDATIIYQSPTGLYETRRKVVD

SEQ ID NO: 199 - protein, 1072 aa, Enterococcus durans
MDEEAKIQLSKESYEEELESLLEKSGEEFRDVFLQAKKVYDAILLSDILSTKKQNSKAKLSLGMIERYDSHKKDLEELKQFVKANLPEKTAIFFKDSSKNGYAGYIDGKTTQEDFYKFLKKELNGIAGSERFMEKVDQENFLLKQRTTANGVIPHQVHLTELKAIIERQKPYYPSLEEARDKMIRLLTFRIPYYVGPLAQGEETSSFAWLERKTPEKVTPWNATEVIDYSASAMKFIQRMINYDTYLPTEKVLPKHSILYQKYTIFNELTKVAYKDERGIKHQFSSKEKREIFKELFQKQRKVTVKKLQQFLSANYNIEDAEILGVDKAFNSSYATYHDFLDLAKPNELLEQPEMNAMFEDIVKILTIFEDREMIRTQLKKYQSVLGDGFFKKLVKKHYTGWGRLSERLINGIRDKKTNKTILDYLIDDDFPYNRNRNFMQLINDDSLSFKEELANELALAGNQSLLEVVEALLGSPAIKKGIWQTLKIVEELIEIIGYNPKNIVVEMARENQRTNRSKPRLKALEEALKSFDSPLLKEQPVDNQALQKDRLYLYYLQNGKDMYTGEALDIDRLSEYDIDHIIPRSFIVDNSIDNKVLVSSKENRLKMDDVPDQKVVIRMRRYWEKLLRANLISERKFAYLTKLELTPEDKARFIQRQLVETRQITKHVAAILDQYFNQPEESKNKGIRIITLKSSLVSQFRKTFGINKVREINNHHHAHDAYLNGVVAIALLKKYPKLEPEFVYGNYTKFNLATENKATAKKEFYSNILRFFEKEEYSYDENGEIFWDKARHIPQIKKVISSHQVNIVKKVEVQTGGFYKETVNPKGKPDKLIQRKAGWDVSKYGGFGSPVVAYAVAFIYEKGKARKKAKAIEGITIMKQSLFEQDPIGFLSNKGYSNVTKFIKLSKYTLYELENGRRRMVASKEAQKANSFILPEKLVTLLYHAQHYDEIAHKESFDYVNDHLSEFREILDQVIDFSNRYTIAAKNTEKIAELFEQNQESTVQSLSQSFINLMQLNAMGAPADFKFFDVIIPRKRYPSLTEIWESTIIYQSITGLRETRTRMATLWDGEQ

SEQ ID NO: 200 - protein, 1329 aa, Enterococcus faecalis
MKKDYVIGLDIGTNSVGWAVMTEDYQLVKKKMPIYGNTEKKKIKKNFWGVRLFEEGHTAEDRRLKRTARRRISRRRNRLRYLQAFFEEAMTDLDENFFARLQESFLVPEDKKWHRHPIFAKLEDEVAYHETYPTIYHLRKKLADSSEQADLRLIYLALAHIVKYRGHFLIEGKLSTENTSVKEQFQQFMVIYNQTFVNGESPLPESVLIEEELTEKASRTKKSEKVLQQFPQEKANGLFGQFLKLMVGNKADFKKVFGLEEEAKITYASESYEEDLEGILAKVGDEYSDVFLAAKNVYDAVELSTILADSDKKSHAKLSSSMIVRFTEHQEDLKKFKRFIRENCPDEYDNLFKNEQKDGYAGYIAHAVSQLKFYQYVKKIIQDIAGAEYFLEKIAQENFLRKQRTFDNGVIPHQIHLAELQAIIHRQAAYYPFLKENQEKIEQLVTFRIPYYVGPLSKGDASTFAWLKRQSEEPIRPWNLQETVDLDQSATAFIERMTNFDTYLPSEKVLPKHSLLYEKFMVFNELTKISYTDDRGIKANFSGKEKEKIFDYLFKTRRKVKKKDIIQFYRNEYNTEIVTLSGLEEDQFNASFSTYQDLLKCGLTRAELDHPDNAEKLEDIIKILTIFEDRQRIRTQLSTFKGQFSAEVLKKLERKHYTGWGRLSKKLINGIYDKESGKTILDYLVDDGVSKHYNRNFMQLINDSQLSFKNAIQKAQSSEHEETLSETVNELAGSPAIKKGIYQSLKIVDELVAIMGYAPKRIVVEMARENQTTSTGKRRSIQRLKIVEKAMAEIGSNLLKEQPTTNEQLRDTRLFLYYMQNGKDMYTGDELSLHRLSHYDIDHIIPQSFMKDDSLDNLVLVGSTENRGKSDDVPSKKVVKKMKAYWEKLYAAGLISQRKFQRLTKGEQGGLTLEDKAHFIQRQLVETRQITKNVAGILDQRYNAKSKEKKVQIITLKASLTSQFRSIFGLYKVREVNDYHHGQDAYLNCVVATTLLKVYPNLAPEFVYGEYPKFQAFKENKATAKTIIYTNLMRFFTEDEPRFTKDSEILWSNSYLKTIKKELNYHQMNIVKKVEVQKGGFSKESIKPKGPSNKLIPVKNGLDPQKYGGFDSPVVAYTVLFTHEKGKKPLIKQEILGITIMEKTRFEQNPILFLEEKGFLRPRVLMKLPKYTLYEFPEGRRRLLASAKEAQKGNQMVLPEHLLTLLYHAKQCLLPNQSESLAYVEQHQPEFQEILERVVDFAEVHTLAKSKVQQIVKLFEANQTADVKEIAASFIQLMQFNAMGAPSTFKFFQKDIERARYTSIKEIFDATIIYQSTTGLYETRRKVVD

SEQ ID NO: 201 - protein, 1329 aa, Enterococcus faecalis
MKKDYVIGLDIGTNSVGWAVMTEDYQLVKKKMPIYGNTEKKKIKKNFWGVRLFEEGHTAEDRRLKRTARRRISRRRNRLRYLQAFFEEAMTALDENFFARLQESFLVPEDKKWHRHPIFAKLEDEVAYHETYPTIYHLRKKLADSSEQADLRLIYLALAHIVKYRGHFLIEGKLSTENISVKEQFQQFMIIYNQTFVNGESPLPESVLIEEELTEKASRTKKSEKVLQQFPQEKANGLFGQFLKLMVGNKADFKKVFGLEEEAKITYASESYEEDLEGILAKVGDEYSDVFLAAKNVYDAVELSTILADSDKKSHAKLSSSMIVRFTEHQEDLKNFKRFIRENCPDEYDNLFKNEQKDGYAGYITHAVSQLKFYQYVKKIIQDIAGAEYFLEKIAQENFLRKQRTFDNGVIPHQIHLAELQAIIHRQAAYYPFLKENQEKIEQLVTFRIPYYVGPLSKGDANTFAWLKRQSEEPIRPWNLQETVDLDQSATAFIERMTNFDTYLPSEKVLPKHSLLYEKFMVFNELTKISYTDDRGIKANFSGKEKEKIFDYLFKTRRKVKKKDIIQFYRNEYNTEIVTLSGLEEDQFNASFSTYQDLLKCGLTRAELDHPDNAEKLEDIIKILTIFEDRQRIRTQLSTFKGQFSAEVLKKLERKHYTGWGRLSKKLINGIYDKESGKTILDYLIDDGVSKHYNRNFMQLINDSQLSFKNAIQKAQSSEHEETLSETVNELAGSPAIKKGIYQSLKIVDELVAIMGYAPKRIVVEMARENQTTSTGKRRSIQRLKIVEKAMAEIGSNLLKEQPTTNEQLRDTRLFLYYMQNGKDMYTGDELSLHRLSHYDIDHIIPQSFMKDDSLDNLVLVGSTENRGKSDDVPSKEVVKDMKAYWEKLYAAGLISQRKFQRLTKGEQGGLTLEDKAHFIQRQLVETRQITKNVAGILDQRYNAKSKEKKVQIITLKASLTSQFRSIFGLYKVREVNDYHHGQDAYLNCVVATTLLKVYPNLAPEFVYGEYPKFQTFKENKATAKAIIYTNLLRFFTEDEPRFTKDGEILWSNSYLKTIKKELNYHQMNIVKKVEVQKGGFSKESIKPKGPSNKLIPVKNGLDPQKYGGFDSPIVAYTVLFTHEKGKKPLIKQEILGITIMEKTRFEQNPILFLEEKGFLRPRVLMKLPKYTLYQFPEGRRRLLASAKEAQKGNQMVLPEHLLTLLYHAKQCLLPNQSESLAYVEQHQPEFQEILERVVDFAEVHTLAKSKVQQIVKLFEANQTADVKEIAASFIQLMQFNAMGAPSTFKFFQKDIERARYTSIKEIFDATIIYQSTTGLYETRRKVVD

SEQ ID NO: 202 - protein, 1329 aa, Enterococcus faecalis
MKKDYVIGLDIGTNSVGWAVMTEDYQLVKKKMPIYGNTEKKKIKKNFWGVRLFEEGHTAEDRRLKRTARRRISRRRNRLRYLQAFFEEAMTALDENFFARLQESFLVPEDKKWHRHPIFAKLEDEVAYHETYPTIYHLRKKLADSSEQADLRLIYLALAHIVKYRGHFLIEGKLSTENISVKEQFQQFMIIYNQTFVNGESPLPESVLIEEELTEKASRTKKSEKVLQQFPQEKANGLFGQFLKLMVGNKADFKKVFGLEEEAKITYASESYEEDLEGILAKVGDEYSDVFLAAKNVYDAVELSTILADSDKKSHAKLSSSMIVRFTEHQEDLKNFKRFIRENCPDEYDNLFKNEQKDGYAGYITHAVSQLKFYQYVKKIIQDIAGAEYFLEKIAQENFLRKQRTFDNGVIPHQIHLAELQAIIHRQAAYYPFLKENQEKIEQLVTFRIPYYVGPLSKGDASTFAWLKRQSEEPIRPWNLQETVDLDQSATAFIERMTNFDTYLPSEKVLPKHSLLYEKFMVFNELTKISYTDDRGIKANFSGKEKEKIFDYLFKTRRKVKKKDIIQFYRNEYNTEIVTLSGLEEDQFNASFSTYQDLLKCGLTRAELDHPDNAEKLEDIIKILTIFEDRQRIRTQLSTFKGQFSAEVLKKLERKHYTGWGRLSKKLINGIYDKESGKTILDYLVDDGVSKHYNRNFMQLINDSQLSFKNAIQKAQSSEHEETLSETVNELAGSPAIKKGIYQSLKIVDELVAIMGYAPKRIVVEMARENQTTSTGKRRSIQRLKIVEKAMAEIGSNLLKEQPTTNEQLRDTRLFLYYMQNGKDMYTGDELSLHRLSHYDIDHIIPQSFMKDDSLDNLVLVGSTENRGKSDDVPSKEVVKDMKAYWEKLYAAGLISQRKFQRLTKGEQGGLTLEDKAHFIQRQLVETRQITKNVAGILDQRYNAKSKEKKVQIITLKASLTSQFRSIFGLYKVREVNDYHHGQDAYLNCVVATTLLKVYPNLAPEFVYGEYPKFQTFKENKATAKAIIYTNLLRFFTEDEPRFTKDGEILWSNSYLKTIKKELNYHQMNIVKKVEVQKGGFSKESIKPKGPSNKLIPVKNGLDPQKYGGFDSPIVAYTVLFTHEKGKKPLIKQEILGITIMEKTRFEQNPILFLEEKGFLRPRVLMKLPKYTLYEFPEGRRRLLASAKEAQKGNQMVLPEHLLTLLYHAKQCLLPNQSESLAYVEQHQPEFQEILERVVDFAEVHTLAKSKVQQIVKLFEANQTADVKEIAASFIQLMQFNAMGAPSTFKFFQKDIERARYTSIKEIFDATIIYQSTTGLYETRRKVVD

SEQ ID NO: 203 - protein, 1329 aa, Enterococcus faecalis
MKKDYVIGLDIGTNSVGWAVMTEDYQLVKKKMPIYGNTEKKKIKKNFWGVRLFEEGHTAEDRRLKRTARRRISRRRNRLRYLQAFFEEAMTDLDENFFARLQESFLVPEDKKWHRHPIFAKLEDEVAYHETYPTIYHLRKKLADSSEQADLRLIYLALAHIVKYRGHFLIEGKLSTENISVKEQFQQFMIIYNQTFVNGESPLPESVLIEEELTEKASRTKKSEKVLQQFPQEKANGLFGQFLKLMVGNKADFKKVFGLEEEAKITYASESYEEDLEGILAKVGDEYSDVFLAAKNVYDAVELSTILADSDKKSHAKLSSSMIVRFTEHQEDLKKFKRFIRENCPDEYDNLFKNEQKDGYAGYIAHAVSQLKFYQYVKKIIQDIAGAEYFLEKIAQENFLRKQRTFDNGVIPHQIHLAELQAIIHRQAAYYPFLKENQEKIEQLVTFRIPYYVGPLSKGDASTFAWLKRQSEEPIRPWNLQETVDLDQSATAFIERMTNFDTYLPSEKVLPKHSLLYEKFMVFNELTKISYTDDRGIKANFSGKEKEKIFDYLFKTRRKVKKKDIIQFYRNEYNTEIVTLSGLEEDQFNASFSTYQDLLKCGLTRAELDHPDNAEKLEDIIKILTIFEDRQRIRTQLSTFKGQFSAEVLKKLERKHYTGWGRLSKKLINGIYDKESGKTILDYLVDDGVSKHYNRNFMQLINDSQLSFKNAIQKAQSSEHEETLSETVNELAGSPAIKKGIYQSLKIVDELVAIMGYAPKRIVVEMARENQTTSTGKRRSIQRLKIVEKAMAEIGSNLLKEQPTTNEQLRDTRLFLYYMQNGKDMYTGDELSLHRLSHYDIDHIIPQSFMKDDSLDNLVLVGSTENRGKSDDVPSKEVVKDMKAYWEKLYAAGLISQRKFQRLTKGEQGGLTLEDKAHFIQRQLVETRQITKNVAGILNQRYNANSKEKKVQIITLKASLTSQFRSIFGLYKVREVNDYHHGQDAYLNCVVATTLLKVYPNLAPEFVYGEYPKFQTFKENKATAKAIIYTNLLRFFTEDEPRFTKDGEILWSNSYLKTIKKELNYHQMNIVKKVEVQKGGFSKESIKPKGPSNKLIPVKNGLDPQKYGGFDSPVVAYTVLFTHEKGKKPLIKQEILGITIMEKTRFEQNPILFLEEKGFLRPRVLMKLPKYTLYEFPEGRRRLLASAKEAQKGNQMVLPEHLLTLLYHAKQCLLPNQSESLAYVEQHQPEFQEILERVVDFAEVHTLAKSKVQQIVKLFEANQTADVKEIAASFIQLMQFNAMGAPSTFKFFQKDIERARYTSIKEIFDATIIYQSTTGLYETRRKVVD

SEQ ID NO: 204 - protein, 1331 aa, Enterococcus faecalis
MKKDYVIGLDIGTNSVGWAVMTEDYQLVKKKMPIYGNTEKKKIKKNFWGVRLFEEGHTAEDRRLKRTARRRISRRRNRLRYLQAFFEEAMTALDENFFARLQESFLVPEDKKWHRHPIFAKLEDEVAYHETYPTIYHLRKKLADSSEQADLRLIYLALAHIVKYRGHFLIEGKLSTENISVKEQFQQFMIIYNQTFVNGESPLPESVLIEEELTEKASRTKKSEKVLQQFPQEKANGLFGQFLKLMVGNKADFKKVFGLEEEAKIKITYASESYEEDLEGILAKVGDEYSDVFLAAKNVYDAVELSTILADSDKKSHAKLSSSMIVRFTEHQEDLKNFKRFIRENCPDEYDNLFKNEQKDGYAGYIAHAVSQLKFYQYVKKIIQDIAGAEYFLEKIAQENFLRKQRTFDNGVIPHQIHLAELQAIIHRQAAYYPFLKENQKKIEQLVTFRIPYYVGPLSKGDASTFAWLKRQSEEPIRPWNLQETVDLDQSATAFIERMTNFDTYLPSEKVLPKHSLLYEKFMVFNELTKISYTDDRGIKANFSGKEKEKIFDYLFKTRRKVKKKDIIQFYRNEYNTEIVTLSGLEEDQFNASFSTYQDLLKCGLTRAELDHPDNAEKLEDIIKILTIFEDRQRIRTQLSTFKGQFSEEVLKKLERKHYTGWGRLSKKLINGIYDKESGKTILDYLIDDGVSKHYNRNFMQLINDSQLSFKNAIQKAQSSEHEETLSETVNELAGSPAIKKGIYQSLKIVDELVAIMGYAPKRIVVEMARENQTTSTGKRRSIQRLKIVEKAMAEIGSNLLKEQPTTNEQLRDTRLFLYYMQNGKDMYTGDELSLHRLSHYDIDHIIPQSFMKDDSLDNLVLVGSTENRGKSDDVPSKEVVKKMKAYWEKLYAAGLISQRKFQRLTKGEQGGLTLEDKAHFIQRQLVETRQITKNVAGILDQRYNAKSKEKKVQIITLKASLTSQFRSIFGLYKVREVNDYHHGQDAYLNCVVATTLLKVYPNLAPEFVYGEYPKFQAFKENKATAKAIIYTNLLRFFTEDEPRFTKDGEILWSNSYLKTIKKELNYHQMNIVKKVEVQKGGFSKESIKPKGPSNKLIPVKNGLDPQKYGGFDSPVVAYTVLFTHEKGKKPLIKQEILGITIMEKTRFEQNPILFLEEKGFLRPRVLMKLPKYTLYEFPEGRRRLLASAKEAQKGNQMVLPEHLLTLLYHAKQCLLPNQSESLAYVEQHQPEFQEILERVVDFAEVHTLAKSKVQQIVKLFEANQTADVKEIAASFIQLMQFNAMGAPSTFKFFQKDIERARYTSIKEIFDATIIYQSTTGLYETRRKVVD

SEQ ID NO: 205 - protein, 1329 aa, Enterococcus faecalis
MKKDYVIGLDIGTNSVGWAVMTEDYQLVKKKMPIYGNTEKKKIKKNFWGVRLFEEGHTAEDRRLKRTARRRISRRRNRLRYLQAFFEEAMTALDENFFARLQESFLVPEDKKWHRHPIFAKLEDEVAYHETYPTIYHLRKKLADSSEQADLRLIYLALAHIVKYRGHFLIEGKLSTENISVKEQFQQFMIIYNQTFVNGESPLPESVLIEEELTEKASRTKKSEKVLQQFPQEKANGLFGQFLKLMVGNKADFKKVFGLEEEAKITYASESYEEDLEGILAKVGDEYSDVFLAAKNVYDAVELSTILADSDKKSHAKLSSSMIVRFTEHQEDLKKFKRFIRENCPDEYDNLFKNEQKDGYAGYIAHAVSQLKFYQYVKKIIQDIAGAEYFLEKIAQENFLRKQRTFDNGVIPHQIHLAELQAIIHRQAAYYPFLKENQEKIEQLVTFRIPYYVGPLSKGDASTFAWLKRQSEEPIRPWNLQETVDLDQSATAFIERMTNFDTYLPSEKVLPKHSLLYEKFMVFNELTKISYTDDRGIKANFSGKEKEKIFDYLFKTRRKVKKKDIIQFYRNEYNTEIVTLSGLEEDQFNASFSTYQDLLKCGLTRAELDHPDNAEKLEDIIKILTIFEDRQRIRTQLSTFKGQFSAEVLKKLERKHYTGWGRLSKKLINGIYDKESGKTILGYLIDDGVSKHYNRNFMQLINDSQLSFKNAIQKAQSSEHEETLSETVNELAGSPAIKKGIYQSLKIVDELVAIMGYAPKRIVVEMARENQTTSTGKRRSIQRLKIVEKAMAEIGSNLLKEQPTTNEQLRDTRLFLYYMQNGKDMYTGDELSLHRLSHYDIDHIIPQSFMKDDSLDNLVLVGSTENRGKSDDVPSKEVVKDMKAYWEKLYAAGLISQRKFQRLTKGEQGGLTLEDKAHFIQRQLVETRQITKNVAGILDQRYNAKSKEKKVQIITLKASLTSQFRSIFGLYKVREVNDYHHGQDAYLNCVVATTLLKVYPNLAPEFVYGEYPKFQTFKENKATAKAIIYTNLLRFFTEDEPRFTKDGEILWSNSYLKTIKKELNYHQMNIVKKVEVQKGGFSKESIKPKGPSNKLIPVKNGLDPQKYGGFDSPIVAYTVLFTHEKGKKPLIKQEILGITIMEKTRFEQNPILFLEEKGFLRPRVLMKLPKYTLYEFPEGRRRLLASAKEAQKGNQMVLPEHLLTLLYHAKQCLLPNQSESLAYVEQHQPEFQEILERVVDFAEVHTLAKSKVQQIVKLFEANQTADVKEIAASFIQLMQFNAMGAPSTFKFFQKDIERARYTSIKEIFDATIIYQSTTGLYETRRKVVD

SEQ ID NO: 206 - protein, 1329 aa, Enterococcus faecalis
MKKDYVIGLDIGSNSVGWAVMTEDYQLVKKKMPIYGNTEKKKIKKNFWGVRLFEEGHTAEDRRLKRTARRRISRRRNRLRYLQAFFEEAMTDLDENFFARLQESFLVPEDKKWHRHPIFAKLEDEVAYHETYPTIYHLRKKLADSSEQADLRLIYLALAHIVKYRGHFLIEGKLSTENTSVKDQFQQFMVIYNQTFVNGESPLPESVLIEEELTEKASRTKKSEKVLQQFPQEKANGLFGQFLKLMVGNKADFKKVFGLEEEAKITYASESYEEDLEGILAKVGDEYSDVFLAAKNVYDAVELSTILADSDKKSHAKLSSSMIVRFTEHQEDLKNFKRFIRENCPDEYDNLFKNEQKDGYAGYITHAVSQLKFYQYVKKIIQDIAGAEYFLEKIAQENFLRKQRTFDNGVIPHQIHLAELQAIIHRQAAYYPFLKENQEKIEQLVTFRIPYYVGPLSKGDASTFAWLKRQSEEPIRPWNLQETVDLDQSATAFIERMTNFDTYLPSEKVLPKHSLLYEKFMVFNELTKISYTDDRGIKANFSGKEKEKIFDYLFKTRRKVKKKDIIQFYRNEYNTEIVTLSGLEEDQFNASFSTYQDLLKCGLTRAELDHPDNAEKLEDIIKILTIFEDRQRIRTQLSTFKGQFSAEVLKKLERKHYTGWGRLSKKLINGIYDKESGKTILDYLIDDGVSKHYNRNFMQLINDSQLSFKNAIQKAQSSEHEETLSETVNELAGSPAIKKGIYQSLKIVDELVAIMGYAPKRIVVEMARENQTTSTGKRRSIQRLKIVEKAMAEIGSNLLKEQPTTNEQLRDTRLFLYYMQNGKDMYTGDELSLHRLSHYDIDHIIPQSFMKDDSLDNLVLVGSTENRGKSDDVPSKEVVKDMKAYWEKLYAAGLISQRKFQRLTKGEQGGLTLEDKAHFIQRQLVETRQITKNVAGILDQLYNAKSKEKKVQIITLKASLTSQFRSIFGLYKVREVNDYHHGQDAYLNCVVATTLLKVYPNLAPEFVYGEYPKFQTFKENKATAKTIIYTNLMRFFTEDEPRFTKDGEILWSNSYLKTIKKELNYHQMNIVKKVEVQKGGFSKESIKPKGPSNKLIPVKNGLDPQKYGGFDSPVVAYTVLFTHEKGKKPLIKQEILGITIMEKTRFEQNPILFLEEKGFLRPRVLMKLPKYTLYEFPEGRRRLLASAKEAQKGNQMVLPEHLLTLLYHAKQCLLPNQSESLAYVEQHQPEFQEILERVVDFAEVHTLAKSKVQQIVKLFEANQTADVKEIAASFIQLMQFNAMGAPSTFKFFQKDIERARYTSIKEIFDATIIYQSTTGLYETRRKVVD

SEQ ID NO: 207 - protein, 1329 aa, Enterococcus faecalis
MKKDYVIGLDIGTNSVGWAVMTEDYQLVKKKMPIYGNTEKKKIKKNFWGVRLFEEGHTAEDRRLKRTARRRISRRRNRLRYLQAFFEEAMTALDENFFARLQESFLVPEDKKWHRHPIFAKLEDEVAYHETYPTIYHLRKKLADSSEQADLRLIYLALAHIVKYRGHFLIEGKLSTENISVKEKFQQFMIIYNQTFVNGEGPLPESVLIEEELTEKASRTKKSEKVLQQFPQEKANGLFGQFLKLMVGNKADFKKVFGLEEEAKITYASESYEEDLEGILAKVGDEYSDVFLAAKNVYDAVELSTILADSDKKSYAKLSSSMIVRFTEHQEDLKKFKRFIRENCPDEYDNLFKNEQKDGYAGYIAHAVSQLKFYQYVKKIIQDIAGAEYFLEKIAQENFLRKQRTFDNGVIPHQIHLAELQAIIHRQAAYYPFLKENQEKIEQLVTFRIPYYVGPLSKGDASTFAWLKRQSEEPIRPWNLQETVDLDQSATAFIERMTNFDTYLPSEKVLPKHSLLYEKFMVFNELTKISYTDDRGIKANFSGKEKEKIFDYLFKTRRKVKKKDIIQFYRNEYNTEIVTLSGLEEDQFNASFSTYQDLLKCGLTRAELDHPDNAEKLEDIIKILTIFEDRQRIRTQLSTFKGQFSAEVLKKLERKHYTGWGRLSKKLINGIYDKESGKTILDYLVDDGVSKHYNRNFMQLINDSQLSFKNAIQKAQSSEHEETLSETVNELAGSPAIKKGIYQSLKIVDELVAIMGYAPKRIVVEMARENQTTSTGKRRSIQRLKIVEKAMAEIGSNLLKEQPTTNEQLRDTRLFLYYMQNGKDMYTGDELSLHRLSHYDIDHIIPQSFMKDDSLDNLVLVGSTENRGKSDDVPSKEVVKDMKAYWEKLYAAGLISQRKFQRLTKGEQGGLTLEDKAHFIQRQLVETRQITKNVAGILDQRYNAKSKEKKVQIITLKASLTSQFRSIFGLYKVREVNDYHHGQDAYLNCVVATTLLKVYPNLAPEFVYGEYPKFQTFKENKATAKAIIYTNLLRFFTEDEPRFTKDGEILWSNSYLKTIKKELNYHQMNIVKKVEVQKGGFSKESIKPKGPSNKLIPVKNGLDPQKYGGFDSPIVAYTVLFTHEKGKKPLIKQEILGITIMEKTRFEQNPILFLEEKGFLRPRVLMKLPKYTLYEFPEGRRRLLASAKEAQKGNQMVLPEHLLTLLYHAKQCLLPNQSESLAYVEQHQPEFQEILERVVDFAEVHTLAKSKVQQIVKLFEANQTADVKEIAASFIQLMQFNAMGAPSTFKFFQKDIERARYTSIKEIFDATIIYQSTTGLYETRRKVVD

SEQ ID NO: 208 - protein, 1329 aa, Enterococcus faecalis
MKKDYVIGLDIGTNSVGWAVMTEDYQLVKKKMPIYGNTEKKKIKKNFWGVRLFEEGHTAEDRRLKRTARRRISRRRNRLRYLQAFFEEAMTALDENFFARLQESFLVPEDKKWHRHPIFAKLEDEVAYHETYPTIYHLRKKLADSSEQADLRLIYLALAHIVKYRGHFLIEGKLSTENISVKDQFQQFMVIYNQTFVNGESPLPESVLIEEELTEKASRTKKSEKVLQQFPQEKANGLFGQFLKLMVGNKADFKKVFGLEEEAKITYASESYEEDLEGILAKVGDEYSDVFLAAKNVYDAVELSTILADSDKKSHAKLSSSMIVRFTEHQEDLKNFKRFIRENCPDEYDNLFKNEQKDGYAGYIAHAVSQLKFYQYVKKIIQDIAGAEYFLEKIAQENFLRKQRTFDNGVIPHQIHLAELQAIIHRQAAYYPFLKENQKKIEQLVTFRIPYYVGPLSKGDASTFAWLKRQSEEPIRPWNLQETVDLDQSATAFIERMTNFDTYLPSEKVLPKHSLLYEKFMVFNELTKISYTDDRGIKANFSGKEKEKIFDYLFKTRRKVKKKDIIQFYRNEYNTEIVTLSGLEEDQFNASFSTYQDLLKCGLTRAELDHPDNAEKLEDIIKILTIFEDRQRIRTQLSTFKGQFSAEVLKKLERKHYTGWGRLSKKLINGIYDKESGKTILDYLIDDGVSKHYNRNFMQLINDSQLSFKNAIQKAQSSEHEETLSETVNELAGSPAIKKGIYQSLKIVDELVAIMGYAPKRIVVEMARENQTTSTGKRRSIQRLKIVEKAMAEIGSNLLKEQPTTNEQLRDTRLFLYYMQNGKDMYTGDELSLHRLSHYDIDHIIPQSFMKDDSLDNLVLVGSTENRGKSDDVPSKEVVKKMKAYWEKLYAAGLISQRKFQRLTKGEQGGLTLEDKAHFIQRQLVETRQITKNVAGILDQRYNAKSKEKKVQIITLKASLTSQFRSIFGLYKVREVNDYHHGQDAYLNCVVATTLLKVYPNLAPEFVYGEYPKFQAFKENKAMAKAIIYTNLLRFFTEDEPRFTKDGEILWSNSYLKTIKKELNYHQMNIVKKVEVQKGGFSKESIKPKGPSNKLIPVKNGLDPQKYGGFDSPVVAYTVLFTHEKGKKPLIKQEILGITIMEKTRFEQNPILFLEEKGFLRPRVLMKLPKYTLYEFPEGRRRLLASAKEAQKGNQMVLPERLLTLLYHAKQCLLPNQSESLAYVEQHQPEFQEILERVVDFAEVHTLAKSKVQQIVKLFEANQTADVKEIAASFIQLMQFNAMGAPSTFKFFQKDIERARYTSIKEIFDATIIYQSTTGLYETRRKVVD

SEQ ID NO: 209 - protein, 1329 aa, Enterococcus faecalis
MKKDYVIGLDIGTNSVGWAVMTEDYQLVKKKMPIYGNTEKKKIKKNFWGVRLFEEGHTAEDRRLKRTARRRISRRRNRLRYLQAFFEEAMTALDENFFARLQESFLVPEDKKWHRHPIFAKLEDEVAYHETYPTIYHLRKKLADSSEQADLRLIYLALAHIVKYRGHFLIEGKLSTENISVKEQFQQFMIIYNQTFVNGESPLPESVLIEEELTEKASRTKKSEKVLQQFPQEKANGLFGQFLKLMVGNKADFKKVFGLEEEAKITYASESYEEDLEGILAKVGDEYSDVFLAAKNVYDAVELSTILADSDKKSHAKLSSSMIVRFTEHQEDLKKFKRFIRENCPDEYDNLFKNEQKDGYAGYIAHAVSQLKFYQYVKKIIQDIAGAEYFLEKIAQENFLRKQRTFDNGVIPHQIHLAELQAIIHRQAAYYPFLKENQEKIEQLVTFRIPYYVGPLSKGDASTFAWLKRQNEKPIRPWNLQETVDLDQSATAFIERMTNFDTYLPSEKVLPKHSLLYEKFMVFNELTKISYTDDRGIKANFSGKEKEKIFDYLFKTRRKVKKKDIIQFYRNEYNTEIVTLSGLEEDQFNASFSTYQDLLKCGLTRAELDHPDNAEKLEDIIKILTIFEDRQRIRTQLSTFKGQFSAEVLKKLERKHYTGWGRLSKKLINGIYDKESGKTILDYLIDDGVSKHYNRNFMQLINDSQLSFKNAIQKAQSSEHEETLSETVNELAGSPAIKKGIYQSLKIVDELVAIMGYAPKRIVVEMARENQTTSTGKRRSIQRLKIVEKAMAEIGSNLLKEQPTTNEQLRDTRLFLYYMQNGKDMYTGDELSLHRLSHYDIDHIIPQSFMKDDSLDNLVLVGSTENRGKSDDVPSKEVVKKMKAYWEKLYAAGLISQRKFQRLTKGEQGGLTLEDKAHFIQRQLVETRQITKNVAGILDQRYNAKSKEKKVQIITLKASLTSQFRSIFGLYKVREVNDYHHGQDAYLNCVVATTLLKVYPNLAPEFVYGEYPKFQAFKENKATAKAIIYTNLMRFFTEVEPRFTKDGEILWSNSYLKTIKKELNYHQMNIVKKVEVQKGGFSKESIKPKGPSNKLIPVKNGLDPQKYGGFDSPVVAYTVLFTHEKGKKPLIKQEILGITIMEKTKFEQNPILFLEEKGFLRPRVLMKLPKYTLYEFPEGRRRLLASAKEAQKGNQMVLPEHLLTLLYHAKQCLLPNQSESLAYVEQHQPEFQEILERVVDFAEVHTLAKSKVQQIVKLFETNQTADVKEIAASFIQLMQFNAMGAPSTFKFFQKDIERARYTSIKEIFDATIIYQSTTGLYETRRKVVD

SEQ ID NO: 210 - protein, 1329 aa, Enterococcus faecalis
MKKDYVIGLDIGTNSVGWAVMTEDYQLVKKKMPIYGNTEKKKIKKNFWGVRLFEEGHTAEDRRLKRTARRRISRRRNRLRYLQAFFEEAMTALDENFFARLQESFLVPEDKKWHRHPIFAKLEDEVAYHETYPTIYHLRKKLADSSEQADLRLIYLALAHIVKYRGHFLIEGKLSTENISVKEQFQQFMIIYNQTFVNGESPLPESVLIEEELTEKASRTKKSEKVLQQFPQEKANGLFGQFLKLMVGNKADFKKVFGLEEEAKITYASESYEEDLEGILAKVGDEYSDVFLAAKNVYDAVELSTILADSDKKSHAKLSSSMIVRFTEHQEDLKNFKRFIRENCPDEYDNLFKNEQKDGYAGYIAHAVSQLKFYQYVKKIIQDIAGAEYFLEKIAQENFLRKQRTFDNGVIPHQIHLAELQAIIHRQAAYYPFLKENQKKIEQLVTFRIPYYVGPLSKGDASTFAWLKRQSEEPIRPWNLQETVDLDQSATAFIERMTNFDTYLPSEKVLPKHSLLYEKFMVFNELTKISYTDDRGIKANFSGKEKEKIFDYLFKTRRKVKKKDIIQFYRNEYNTEIVTLSGLEEDQFNASFSTYQDLLKCGLTRAELDHPDNAEKLEDIIKILTIFEDRQRIRTQLSTFKGQFSEEVLKKLERKHYTGWGRLSKKLINGIYDKESGKTILDYLIDDGVSKHYNRNFMQLINDSQLSFKNAIQKAQSSEHEETLSETVNELAGSPAIKKGIYQSLKIVDELVAIMGYAPKRIVVEMARENQTTSTGKRRSIQRLKIVEKAMAEIGSNLLKEQPTTNEQLRDTRLFLYYMQNGKDMYTGDELSLHRLSHYDIDHIIPQSFMKDDSLDNLVLVGSTENRGKSDDVPSKEVVKKMKAYWEKLYAAGLISQRKFQRLTKGEQGGLTLEDKAHFIQRQLVETRQITKNVAGILDQRYNAKSKEKKVQIITLKASLTSQFRSIFGLYKVREVNDYHHGQDAYLNCVVATTLLKVYPNLAPEFVYGEYPKFQAFKENKATAKAIIYTNLLRFFTEDEPRFTKDGEILWSNSYLKTIKKELNYHQMNIVKKVEVQKGGFSKESIKPKGPSNKLIPVKNGLDPQKYGGFDSPVVAYTVLFTHEKGKKPLIKQEILGITIMEKTRFEQNPILFLEEKGFLRPRVLMKLPKYTLYEFPEGRRRLLASAKEAQKGNQMVLPEHLLTLLYHAKQCLLPNQSESLAYVEQHQPEFQEILERVVDFAEVHTLAKSKVQQIVKLFEANQTADVKEIAASFIQLMQFNAMGAPSTFKFFQKDIERARYTSIKEIFDATIIYQSTTGLYETRRKVVD

SEQ ID NO: 211 - protein, 1328 aa, Enterococcus faecium
MKKEYTIGLDIGTNSVGWSVLTDDYRLVSKKMKVAGNTEKSSTKKNFWGVRLFDEGQTAEARRSKRTARRRLARRRQRILELQKIFAPEILKIDEHFFARLNESFLVLDEKKQSRHPVFATIKQEKSYHQTYPTIYHLRQALADSSEKADIRLVYLAMAHLLKYRGHFLIEGELNTENSSVTETFRQFLSTYNQQFSEADKLDEAVDCSFVFTEKMSKTKKAETLLKYFPHEKSNGYLSQFIKLMVGNQGNFKNVFGLEEAKLQFSKETYEEDLEELLEKIGDDYIDLFVQAKNVYDAVLLSEILSDSTKNTRAKLSAGMIRRYDAHKEDLVLLKRFVKENLPKKYRAFFGDNSVNGYAGYIEGHATQEDFYKFVKKELTGIRGSEVFLTKIEQENFLRKQRTFDNGVIPHQIHLTELRAIIANQKKHYPFLKEEQEKLESLLTFKIPYYVGPLAKKQENSPFAWLIRKSEEKIKPWNLPEIVDMEGSAVRFIERMINTDMYMPHNKVLPKNSLLYQKFSIYNELTKVRYQDERGQMNYFSSIEKKEIFHELFEKNRKVTKKDLQEFLYLKYDIKHAELSGIEKAFNASYTTYHDFLTMSENKQWLEDPELASMFEEIIKTLTVFEDREMIKTRLSHHEATLGKHIIKKLTKKHYTGWGRLSKELIQGIRDKQSNKTILDYLIDDDFPHHRNRNFMQLINDDSLSFKKEIKKAQMITDTENLEEIVKELTGSPAIKKGILQSLKIVDEIVGIMGYEPANIVVEMARENQTTGRGLKSSRPRLKALEESLKDFGSQLLKEYPTDNSSLQKDRLYLYYLQNGRDMYTGAPLDIHRLSDYDIDHIIPRSFTTDNSIDNKVLVSSKENRLKKDDVPSEKVVKKMRSFWYDLYSSKLISKRKLDNLTKIKLTEEDKAGFIKRQLVETRQITKHVAGILHHRFNKAEDTNEPIRKVRIITLKSALVSQFRNRFGIYKVREINEYHHAHDAYLNGVVALALLKKYPQLAPEFVYGEYLKFNAHKANKATVKKEFYSNIMKFFESDTPVCDENGEIFWDKSKSIAQVKKVINHHHMNIVKKTEIQKGGFSKETVEPKKDSSKLLPRKNNWDPAKYGGLGSPNVAYTVAFTYEKGKARKRTNALEGITIMEREAFEQSPVLFLKNKGYEQAEIEMKLPKYALFELENGRKRMVASKEAQKANSFLLPEHLVTLLYHAKQYDEISHKESFDYVNEHHKEFSEVFARVLEFAGKYTLAEKNIEKLEKIYKENQTDDLAKLASSFVNLMQFNAMGAPADFKFFDVTIPRKRYTSLTEIWQSTIIHQSITGLYETRIRMGK

SEQ ID NO: 212 - protein, 1329 aa, Enterococcus faecium
MKKEYTIGLDIGTNSVGWSVLTDDYRLVSKKMKVAGNTEKSSTKKNFWGVRLFDEGQTAEARRSKRTARRRLARRRQRILELQKIFAPEILKIDEHFFARLNESFLVPDEKKQSRHPVFATIKQEKSYHQTYPTIYHLRQALADSSEKADIRLVYLAMAHLLKYRGHFLIEGELNTENSSVTETFRQFLSTYNQQFSEAGKLDEAVDCSFVFTEKMSKTKKAETLLKYFPHEKSNGYLSQFIKLMVGNQGNFKNVFGLEEEAKLQFSKETYEEDLEELLEKIGDDYIDLFVQAKNVYDAVLLSEILSDSTKNTRAKLSAGMIRRYDAHKEDLVLLKRFVKENLPKKYRAFFGDNSVNGYAGYIEGHATQEAFYKFVKKELTGIRGSEVFLTKIEQENFLRKQRTFDNGVIPHQIHLSELRAIIANQKKHYPFLKEEQEKLESLLTFKIPYYVGPLAKKQENSPFAWLIRKSEEKIKPWNLPEIVDMEGSAVRFIERMINTDMYMPHNKVLPKNSLLYQKFSIYNELTKVRYQDERGQMNYFSSIEKKEIFHELFEKNRKVTKKDLQEFLYLKYDIKHAELSGIEKAFNASYTTYHDFLTMSENKQWLEDPELASMFEEIIKTLTVFEDREMIKTRLSHHEATLGKHIIKKLTKKHYTGWGRLSKELIQGIRDKQSNKTILDYLIDDDFPHHRNRNFMQLINDDSLSFKKEIKKAQMITDTENLEEIVKELTGSPAIKKGILQSLKIVDEIVGIMGYEPANIVVEMARENQTTGRGLKSSRPRLKALEESLKDFGSQLLKEYPTDNSSLQKDRLYLYYLQNGRDMYTGAPLDIHRLSDYDIDHIIPRSFTTDNSIDNKVLVSSKENRLKKDDVPSEKVVKKMRSFWYDLYSSKLISKRKLDNLTKIKLTEEDKAGFIKRQLVETRQITKHVAGILHHRFNKAEDTNDPIRKVRIITLKSALVSQFRNRFGIYKVREINEYHHAHDAYLNGVVALALLKKYPQLAPEFVYGEYLKFNAHKANKATVKKEFYSNIMKFFESDTPVCDENGEIFWDKSKSIAQVKKVINHHHMNIVKKTEIQKGGFSKETVEPKKDSSKLLPRKNNWDPAKYGGLGSPNVAYTVAFTYEKGKARKRTNALEGITIMEREAFEQSPVLFLKNKGYEQAEIEMKLPKYALFELENGRKRMVASKEAQKANSFLLPEHLVTLLYHAKQYDEISHKESFDYVNEHHKEFSEVFARVLEFAGKYTLAEKNIEKLEKIYKENQTDDLAKLASSFVNLMQFNAMGAPADFKFFDVTIPRKRYTSLTEIWQSTIIHQSITGLYETRIRMGK

SEQ ID NO: 213 - protein, 1329 aa, Enterococcus faecium
MKKEYTIGLDIGTNSVGWSVLTDDYRLVSKKMKVAGNTEKSSTKKNFWGVRLFDEGQTAEARRSKRTARRRLARRRQRILELQKIFAPEILKIDEHFFARLNESFLVLDEKKQSRHPVFATIKQEKSYHQTYPTIYHLRQALADSSEKADIRLVYLAMAHLLKYRGHFLIEGELNTENSSVTETFRQFLSTYNQQFSEADKLDEAVDCSFVFTEKMSKTKKAETLLKYFPHEKSNGYLSQFIKLMVGNQGNFKNVFGLEEEAKLQFSKETYEEDLEELLEKIGDDYIDLFVQAKNVYDAVLLSEILSDSTKNTRAKLSAGMIRRYDAHKEDLVLLKRFVKENLPKKYRAFFGDNSVNGYAGYIEGHATQEDFYKFVKKELTGIRGSEVFLTKIEQENFLRKQRTFDNGVIPHQIHLTELRAIIANQKKHYPFLKEEQEKLESLLTFKIPYYVGPLAKKQENSPFAWLIRKSEEKIKPWNLPEIVDMEGSAVRFIERMNNTDMYIPHNKVLPKNSLLYQKFSIYNELTKVRYQDERGQMNYFSSIEKKEIFHELFEKNRKVTKKDLQEFLYLKYDIKHAELSGIEKAFNASYTTYHDFLTMSENKQWLEDPELASMFEEIIKTLTVFEDREMIKTRLSHHEATLGKHIIKKLTKKHYTGWGRLSKELIQGIRDKQSNKTILDYLIDDDFPHHRNRNFMQLINDDSLSFKKEIKKAQMITDTENLEEIVKELTGSPAIKKGILQSLKIVDEIVGIMGYEPANIVVEMARENQTTGRGLKSSRPRLKALEESLKDFGSQLLKEYPTDNSSLQKDRLYLYYLQNGRDMYTGAPLDIHRLSDYDIDHIIPRSFTTDNSIDNKVLVSSKENRLKKDDVPSEKVVKKMRSFWYDLYSSKLISKRKLDNLTKIKLTEEDKAGFIKRQLVETRQITKHVAGILHHRFNKAEDTNEPIRKVRIITLKSALVSQFRNRFGIYKVREINEYHHAHDAYLNGVVALALLKKYPQLAPEFVYGEYLKFNAHKANKATVKKEFYSNIMKFFESDTPVCDENGEIFWDKSKSIAQVKKVINHHHMNIVKKTEIQKGGFSKETVEPKKDSSKLLPRKNNWDPAKYGGLGSPNVAYTVAFTYEKGKARKRTNALEGITIMEREAFEQSPVLFLKNKGYEQAEIEMKLPKYALFELENGRKRMVASKEAQKANSFLLPEHLVTLLYHAKQYDEISHKESFDYVNEHHKEFSEVFARVLEFAGKYTLAEKNIEKLEKIYKENQTDDLAKLASSFVNLMQFNAMGAPADFKFFDVTIPRKRYTSLTEIWQSTIIHQSITGLYETRIRMGK

SEQ ID NO: 214 - protein, 1329 aa, Enterococcus faecium
MKKEYTIGLDIGTNSVGWSVLTDDYRLVSKKMKVAGNTEKSSTKKNFWGVRLFDEGQTAEARRSKRTARRRLARRRQRILELQKIFAPEILKIDEHFFARLNESFLVLDEKKQSRHPVFATIKQEKSYHQTYPTIYHLRQALADSSEKADIRLVYLAMAHLLKYRGHFLIEGELNTENSSVTETFRQFLSTYNQQFSEADKLDEAVDCSFVFTEKMSKTKKAETLLKYFPHEKSNGYLSQFIKLMVGNQGNFKNVFGLEEEAKLQFSKETYEEDLEELLEKIGDDYIDLFVQAKNVYDAVLLSEILSDSTKNTRAKLSAGMIRRYDAHKEDLVLLKRFVKENLPKKYRAFFGDNSVNGYAGYIEGHATQEDFYKFVKKELTGIRGSEVFLTKIEQENFLRKQRTFDNGVIPHQIHLTELRAIIANQKKHYPFLKEEQEKLESLLTFKIPYYVGPLAKKQENSPFAWLIRKSEEKIKPWNLPEIVDMEGSAVRFIERMINTDMYIPHNKVLPKNSLLYQKFSIYNELTKVRYQDERGQMNYFSSIEKKEIFHELFEKNRKVTKKDLQEFLYLKYDIKHAELSGIEKAFNASYTTYHDFLTMSENKQWLEDPELASMFEEIIKTLTVFEDREMIKTRLSHHEATLGKHIIKKLTKKHYTGWGRLSKELIQGIRDKQSNKTILDYLIDDDFPHHRNRNFMQLINDDSLSFKKEIKKAQMITDTENLEEIVKELTGSPAIKKGILQSLKIVDEIVGIMGYEPANIVVEMARENQTTGRGLKSSRPRLKALEESLKDFGSQLLKEYPTDNSSLQKDRLYLYYLQNGRDMYTGAPLDIHRLSDYDIDHIIPRSFTTDNSIDNKVLVSSKENRLKKDDVPSEKVVKKMRSFWYDLYSSKLISKRKLDNLTKIKLTEEDKAGFIKRQLVETRQITKHVAGILHHRFNKAEDTNEPIRKVRIITLKSALVSQFRNRFGIYKVREINEYHHAHDAYLNGVVALALLKKYPQLAPEFVYGEYLKFNAHKANKATVKKEFYSNIMKFFESDTPVCDENGEIFWDKSKSIAQVKKVINHHHMNIVKKTEIQKGGFSKETVEPKKDSSKLLPRKNNWDPAKYGGLGSPNVAYTVAFTYEKGKARKRTNALEGITIMEREAFEQSPVLFLKNKGYEQAEIEMKLPKYALFELENGRKRMVASKEAQKANSFLLPEHLVTLLYHAKQYDEISHKESFDYVNEHHKEFSEVFARVLEFAGKYTLAEKNIEKLEKIYKENQTDDLAKLASSFVNLMQFNAMGAPADFKFFDVTIPRKRYTSLTEIWQSTIIHQSITGLYETRIRMGK

SEQ ID NO: 215 - protein, 1328 aa, Enterococcus faecium
MKKEYTIGLDIGTNSVGWSVLTDDYRLVSKKMKVAGNTEKSSTKKNFWGVRLFDEGQTAEARRSKRTARRRLARRRQRILELQKIFAPEILKIDEHFFARLNESFLVLDEKKQSRHPVFATIKQEKSYHQTYPTIYHLRQALADSSEKADIRLVYLAMAHLLKYRGHFLIEGELNTENSSVTETFRQFLSTYNQQFSEADKLDEAVDCSFVFTEKMSKTKKAETLLKYFPHEKSNGYLSQFIKLMVGNQGNFKNVFGLEEAKLQFSKETYEEDLEELLEKIGDDYIDLFVQAKNVYDAVLLSEILSDSTKNTRAKLSAGMIRRYDAHKEDLVLLKRFVKENLPKKYRAFFGDNSVNGYAGYIEGHATQEDFYKFVKKELTGIRGSEVFLTKIEQENFLRKQRTFDNGVIPHQIHLTELRAIIANQKKHYPFLKEEQEKLESLLTFKIPYYVGPLAKKQENSPFAWLIRKSEEKIKPWNLPEIVDMEGSAVRFIERMINTDMYIPHNKVLPKNSLLYQKFSIYNELTKVRYQDERGQMNYFSSIEKKEIFHELFEKNRKVTKKDLQEFLYLKYDIKHAELSGIEKAFNASYTTYHDFLTMSENKQWLEDPELASMFEEIIKTLTVFEDREMIKTRLSHHEATLGKHIIKKLTKKHYTGWGRLSKELIQGIRDKQSNKTILDYLIDDDFPHHRNRNFMQLINDDSLSFKKEIKKAQMITDTENLEEIVKELTGSPAIKKGILQSLKIVDEIVGIMGYEPANIVVEMARENQTTGRGLKSSRPRLKALEESLKDFGSQLLKEYPTDNSSLQKDRLYLYYLQNGRDMYTGAPLDIHRLSDYDIDHIIPRSFTTDNSIDNKVLVSSKENRLKKDDVPSEKVVKKMRSFWYDLYSSKLISKRKLDNLTKIKLTEEDKAGFIKRQLVETRQITKHVAGILHHRFNKAEDTNEPIRKVRIITLKSALVSQFRNRFGIYKVREINEYHHAHDAYLNGVVALALLKKYPQLAPEFVYGEYLKFNAHKANKATVKKEFYSNIMKFFESDTPVCDENGEIFWDKSKSIAQVKKVINHHHMNIVKKTEIQKGGFSEETVEPKKDSSKLLPRKNNWDPAKYGGLGSPNVAYTVAFTYEKGKARKRTNALEGITIMEREAFEQSPVLFLKNKGYEQAEIEMKLPKYALFELENGRKRMVASKEAQKANSFLLPEHLVTLLYHAKQYDEISHKESFDYVNEHHKEFSEVFARVLEFAGKYTLAEKNIEKLEKIYKENQTDDLAKLASSFVNLMQFNAMGAPADFKFFDVTIPRKRYTSLTEIWQSTIIHQSITGLYETRIRMGK

SEQ ID NO: 216 - protein, 1329 aa, Enterococcus faecium
MKKEYTIGLDIGTNSVGWSVLTDDYRLVSKKMKVAGNTEKSSTKKNFWGVRLFDEGQTAEARRSKRTARRRLARRRQRILELQKIFAPEILKIDEHFFARLNESFLVLDEKKQSRHPVFATIKQEKSYHQTYPTIYHLRQALADSSEKADIRLVYLAMAHLLKYRGHFLIEGELNTENSSVTETFRQFLSTYNQQFSEADKLDEAVDCSFVFTEKMSKTKKAETLLKYFPHEKSNGYLSQFIKLMVGNQGNFKNVFGLEEEAKLQFSKETYEEDLEELLEKIGDDYIDLFVQAKNVYDAVLLSEILSDSTKNTRAKLSAGMIRRYDAHKEDLVLLKRFVKENLPKKYRAFFGDNSVNGYAGYIEGHATQEDFYKFVKKELTGIRGSEVFLTKIEQENFLRKQRTFDNGVIPHQIHLTELRAIIANQKKHYPFLKEEQEKLESLLTFKIPYYVGPLAKKQENSPFAWLIRKSEEKIKPWNLPEIVDMEGSAVRFIERMINTDMYMPHNKVLPKNSLLYQKFSIYNELTKVRYQDERGQMNYFSSIEKKEIFHELFEKNRKVTKKDLQEFLYLKYDIKHAELSGIEKAFNASYTTYHDFLTMSENKQWLEDPELASMFEEIIKTLTVFEDREMIKTRLSHHEATLGKHIIKKLTKKHYTGWGRLSKELIQGIRDKQSNKTILDYLIDDDFPHHRNRNFMQLINDDSLSFKKEIKKAQMITDTENLEEIVKELTGSPAIKKGILQSLKIVDEIVGIMGYEPANIVVEMARENQTTGRGLKSSRPRLKALEESLKDFGSQLLKEYPTDNSSLQKDRLYLYYLQNGRDMYTGAPLDIHRLSDYDIDHIIPRSFTTDNSIDNKVLVSSKENRLKKDDVPSEKVVKKMRSFWYDLYSSKLISKRKLDNLTKIKLTEEDKAGFIKRQLVETRQITKHVAGILHHRFNKAEDTNEPIRKVRIITLKSALVSQFRNRFGIYKVREINEYHHAHDAYLNGVVALALLKKYPQLAPEFVYGEYLKFNAHKANKATVKKEFYSNIMKFFESDTPVCDENGEIFWDKSKSIAQVKKVINHHHMNIVKKTEIQKGGFSKETVEPKKDSSKLLPRKNNWDPAKYGGLGSPNVAYTVAFTYEKGKARKRTNALEGITIMEREAFEQSPVLFLKNKGYEQAEIEMKLPKYALFELENGRKRMVASKEAQKANSFLLPEHLVTLLYHAKQYDEISHKESFDYVNEHHKEFSEVFARVLEFAGKYTLAEKNIEKLEKIYKENQTDDLAKLASSFVNLMQFNAMGAPADFKFFDVTIPRKRYTSLTEIWQSTIIHQSITGLYETRIRMGK

SEQ ID NO: 217 - protein, 1329 aa, Enterococcus faecium
MKKEYTIGLDIGTNSVGWSVLTDDYRLVSKKMKVAGNTEKSSTKKNFWGVRLFDEGQTAEARRSKRTARRRLARRRQRILELQKIFAPEILKIDEHFFARLNESFLVLDEKKQSRHPVFATIKQEKSYHQTYPTIYHLRQALADSSEKADIRLVYLAMAHLLKYRGHFLIEGELNTENSSVTETFRQFLSTYNQQFSEADKLDEAVDCSFVFTEKMSKTKKAETLLKYFPHEKSNGYLSQFIKLMVGNQGNFKNVFGLEEEAKLQFSKETYEEDLEELLEKIGDDYIDLFVQAKNVYDAVLLSEILSDSTKNTRAKLSAGMIRRYDAHKEDLVLLKRFVKENLPKKYRAFFGDNSVNGYAGYIEGHATQEDFYKFVKKELTGIRGSEVFLTKIEQENFLRKQRTFDNGVIPHQIHLTELRAIIANQKKHYPFLKEEQEKLESLLTFKIPYYVGPLAKKQENSPFAWLIRKSEEKIKPWNLPEIVDMEGSAVRFIERMINTDMYIPHNKVLPKNSLLYQKFSIYNELTKVRYQDERGQMNYFSSIEKKEIFHELFEKNRKVTKKDLQEFLYLKYDIKHAELSGIEKAFNASYTTYHDFLTMSENKQWLEDPELASMFEEIIKTLTVFEDREMIKTRLSHHEATLGKHIIKKLTKKHYTGWGRLSKELIQGIRDKQSNKTILDYLIDDDFPHHRNRNCMQLINDDSLSFKKEIKKAQMITDTENLEEIVKELTGSPAIKKGILQSLKIVDEIVGIMGYEPANIVVEMARENQTTGRGLKSSRPRLKALEESLKDFGSQLLKEYPTDNSSLQKDRLYLYYLQNGRDMYTGAPLDIHRLSDYDIDHIIPRSFTTDNSIDNKVLVSSKENRLKKDDVPSEKVVKKMRSFWYDLYSSKLISKRKLDNLTKIKLTEEDKAGFIKRQLVETRQITKHVAGILHHRFNKAEDTNEPIRKVRIITLKSALVSQFRNRFGIYKVREINEYHHAHDAYLNGVVALALLKKYPQLAPEFVYGEYLKFNAHKANKATVKKEFYSNIMKFFESDTPVCDENGEIFWDKSKSIAQVKKVINHHHMNIVKKTEIQKGGFSKETVEPKKDSSKLLPRKNNWDPTKYGGLGSPNVAYTVAFTYEKGKARKRTNALEGITIMEREAFEQSPVLFLKNKGYEQAEIEMKLPKYALFELENGRKRMVASKEAQKANSFLLPEHLVTLLYHAKQYDEISHKESFDYVNEHHKEFSEVFARVLEFAGKYTLAEKNIEKLEKIYKENQTDDLAKLASSFVNLMQFNAMGAPADFKFFDVTIPRKRYTSLTEIWQSTIIHQSITGLYETRIRMGK

SEQ ID NO: 218 - protein, 1329 aa, Enterococcus faecium
MTKDYTIGLDIGTNSVGWAVLTDDYQLMKRKMSVHGNTEKKKIKKNFWGARLFDEGQTAEFRRTKRTNRRRLARRKYRLSKLQDLFAEELCKQDDCFFVRLEESFLVPEEKQYKPASIFPTLEEEKEYYQKYPTIYHLRQKLVDSTEKEDLRLVYLALAHLLKYRGHFLFEGDLDTENTSIEESFRVFLEQYSKQSDQPLIVHQPVLTILTDKLSKTKKVEEILKYYPTEKINSFFAQCLKLIVGNQANFKRIFDLEAEVKLQFSKETYEEDLESLLEKIGDEYLDIFLQAKKVHDAILLSEIISSTVKHTKAKLSSGMVERYERHKADLAKFKQFVKENVPQKATVFFKDTTKNGYAGYIKGKTTQEEFYKFVKKELSGVVGSEPFLEKIDQETFLLKQRTYTNGVIPHQVHLIELKAIIDQQKQHYPFLEEAGPKIIALFKFRIPYYVGPLAKEQEASSFAWIERKTAEKINPWNFSEVVDIEKSAMRFIQRMTKQDTYLPTEKVLPKNSLLYQKYMIFNELTKVSYKDERGVKQYFSGDEKQQIFKQLFQKERGKITVKKLQNFLYTHYHIENAQIFGIEKAFNASYSTYHDFMKLAKTNEWLEQPEMEPIFEDIVKILTIFEDRQMIKHQLSKYQEVFGEKLLKEFARKHYTGWGRFSAKLIHGIRDRKTNKTILDYLIDDDVPANRNRNLMQLINDEHLSFKEEIAKATVFSKHKSLVDVIQDLPGSPAIKKGIWQSLKIVEELIAIIGYKPKNIVIEMARENQKTHRTSPRLKALENGLKQIGSTLLKEQPTDNKALQKERLYLYYLQNGRDMYTGEPLEIENLHQYEVDHIIPRSFIVDNSIDDKVLVASKQNQKKRDDVPKKQIVNEQRIFWNQLKEAKLISTKKYAYLTKIELTPEDKARFIQRQLVETRQITKHVANILHQSFNQEEEGTDCDGVQIITLKATLTSQFRQTFGLYKVREINPHHHAHDAYLNGFIANVLLKRYPKLAPEFVYGKYVKYSLARENKATAKKEFYSNILKFLESDEPFCDENGEIYWEKSHHLPRIKKVLSSHQVNVVKKVEQQKGGFYKETVNSKEKPDKLIERKNNWDVTKYGGFGSPVIAYAIAFVYAKGKTQKKTRAIEGITIMEQAAFEKDPTTFLKEKGFPQVTEFIKLPKYTLFEFDNGRRRFLASKESQKGNPFILSDQLVTLLYHAQHYDKITYQESFDYVNTHLSDFSAILTEVLAFAEKYTLADKNIERIQELYEENKYGETSMIAQSFLQLLQFNAIGAPADFKFFGVTIPRKRYTSLTEIWDATIIYQSVTGLYETRIRMGDLWAGEQ

SEQ ID NO: 219 - protein, 1329 aa, Enterococcus faecium
MKKEYTIGLDIGTNSVGWSVLTDDYRLVSKKMKVAGNTEKSSTKKNFWGVRLFDEGQTAEARRSKRTARRRLARRRQRILELQKIFAPEILKIDEHFFARLNESFLVLDEKKQSRHPVFATIKQEKSYHQTYPTIYHLRQALADSSEKADIRLVYLAMAHLLKYRGHFLIEGELNTENSSVTETFRQFLSTYNQQFSEADKLDEAVDCSFVFTEKMSKTKKAETLLKYFPHEKSNGYLSQFIKLMVGNQGNFKNVFGLEEEAKLQFSKETYEEDLEELLEKIGDDYIDLFVQAKNVYDAVLLSEILSDSTKNTRAKLSAGMIRRYDAHKEDLVLLKRFVKENLPKKYRAFFGDNSVNGYAGYIEGHATQEDFYKFVKKELTGIRGSEVFLTKIEQENFLRKQRTFDNGVIPHQIHLTELRAIIANQKKHYPFLKEEQEKLESLLTFKIPYYVGPLAKKQENSPFAWLIRKSEEKIKPWNLPEIVDMEGSAVRFIERMINTDMYMPHNKVLPKNSLLYQKFSIYNELTKVRYQDERGQMNYFSSIEKKEIFHELFEKNRKVTKKDLQEFLYLKYDIKHAELSGIEKAFNASYTTYHDFLTMSENKQWLEDPELASMFEEIIKTLTVFEDREMIKTRLSHHEATLGKHIIKKLTKKHYTGWGRLSKELIQGIRDKQSNKTILDYLIDDDFPHHRNRNFMQLINDDSLSFKKEIKKAQMITDTENLEEIVKELTGSPAIKKGILQSLKIVDEIVGIMGYEPANIVVEMARENQTTGRGLKSSRPRLKALEESLKDFGSQLLKEYPTDNSSLQKDRLYLYYLQNGRDMYTGAPLDIHRLSDYDIDHIIPRSFTTDNSIDNKVLVSSKENRLKKDDVPSEKVVKKMRSFWYDLYSSKLISKRKLDNLTKIKLTEEDKAGFIKRQLVETRQITKHVAGILHHRFNKAEDTNEPIRKVRIITLKSALVSQFRNRFGIYKVREINEYHHAHDAYLNGVIALALLKKYPQLAPEFVYGEYLKFNAHKANKATVKKEFYSNIMKFFESDTPVCDENGEIFWDKSKSIAQVKKVINHHHMNIVKKTEIQKGGFSKETVEPKKDSSKLLPRKNNWDPAKYGGLGSPNVAYTVAFTYEKGKARKRTNALEGITIMEREAFEQSPVLFLKNKGYEQAEIEMKLPKYALFELENGRKRMVASKEAQKANSFLLPEHLVTLLYHAKQYDEISHKESFDYVNEHHKEFSEVFARVLEFAGKYTLAEKNIEKLEKIYKENQTDDLAKLASSFVNLMQFNAMGAPADFKFFDVTIPRKRYTSLTEIWQSTIIHQSITGLYETRIRMGK

SEQ ID NO: 220 - protein, 1329 aa, Enterococcus faecium
MTKDYTIGLDIGTNSVGWAVLTDDYQLMKRKMSVHGNTEKKKIKKNFWGARLFDEGQTAEFRRTKRTNRRRLARRKYRLSKLQDLFAEELCKQDDCFFVRLEESFLVPEEKQYKPASIFPTLEEEKEYYQKYPTIYHLRQKLVDSTEKGDLRLVYLALAHLLKYRGHFLFEGDLDTENTSIEESFRVFLEQYGKQSDQPLIVHQPVLTILTDKLSKTKKVEEILKYYPTEKINSFFAQCLKLIVGNQANFKRIFDLEAEVKLQFSKETYEEDLESLLEKIGDEYLDIFLQAKKVHDAILLSEIISSTVKHTQAKLSSGMVERYERHKADLAKFKQFVKENVPQKATVFFKDTTKNGYAGYIKGKTTQEEFYKFVKKELSGVVGSEPFLEKIDQETFLLKQRTYTNGVIPHQVHLIELKAIIDQQKQHYPFLEEAGPKIIALFKFRIPYYVGPLAKEQEASSFAWIERKTAEKINPWNFSEVVDIEKSAMRFIQRMTKQDTYLPTEKVLPKNSLFYQKYMIFNELTKVSYKDERGVKQYFSGDEKQQIFKQLFQKERGKITVKKLQNFLYTHYHIENAQIFGIEKAFNASYSTYHDFMKLAKTNEWLEQPEMEPIFEDIVKILTIFEDRQMIKHQLSKYQEVFGEKLLKEFARKHYTGWGRFSAKLIHGIRDRKTNKTILDYLIDDDVPANRNRNLMQLINDEHLSFKEEIAKATVFSKHKSLVDVIQDLPGSPAIKKGIWQSLKIVEELIAIIGYKPKNIVIEMARENQKTHRTKPRLKALENGLKQIGSTLLKEQPTDNKALQKERLYLYYLQNGRDMYTGEPLEIENLHQYEVDHIIPRSFIVDNSIDNKVLVASKQNQKKRDDVPKKQIVNEQRIFWNQLKEAKLISPKKYAYLTKIELTPEDKARFIQRQLVETRQITKHVANILHQSFNQEEEGTDCDGVQIITLKATLTSQFRQTFGLYKVREINPHHHAHDAYLNGFIANVLLKRYPKLAPEFVYGKYVKYSLARENKATAKKEFYSNILKFLESDEPFCDENGEIYWEKSHHLPRIKKVLSSHQVNVVKKVEQQKGGFYKETVNSKEKPDKLIERKNNWDVTKYGGFGSPVIAYAIAFVYAKGKTQKKTKAIEGITIMEQAAFEKDPTTFLKDKGFPQVTEFIKLPKYTLFEFDNGRRRFLASKESQKGNPFILSDQLVTLLYHAQHYDKITYQESFDYVNTHLSDFSAILTEVLAFAEKYTLADKNIERIQELYEENKYGEISMIAQSFLQLLQFNAIGAPADFKFFGVTIPRKRYTSLTEIWDATIIYQSVTGLYETRIRMGDLWAGEQ

SEQ ID NO: 221 - protein, 1329 aa, Enterococcus faecium
MTKDYTIGLDIGTNSVGWAVLTDDYQLMKRKMSVHGNTEKKKIKKNFWGARLFDEGQTAEFRRTKRTNRRRLARRKYRLSKLQDLFAEELCKQDDCFFVRLEESFLVPEEKQYKPASIFPTLEEEKEYYQKYPTIYHLRQKLVDSTEKEDLRLVYLALAHLLKYRGHFLFEGDLDTENTSIEESFRVFLEQYSKQSDQPLIVHQPVLTILTDKLSKTKKVEEILKYYPTEKINSFFAQCLKLIVGNQANFKRIFDLEAEVKLQFSKETYEEDLESLLEKIGDEYLDIFLQAKKVHDAILLSEIISSTVKHTKAKLSSGMVERYERHKADLAKFKQFVKENVPQKATVFFKDTTKNGYAGYIKGKTTQEEFYKFVKKELSGVVGSEPFLEKIDQETFLLKQRTYTNGVIPHQVHLIELKAIIDQQKQHYPFLEEAGPKIIALFKFRIPYYVGPLAKEQEASSFAWIERKTAEKINPWNFSEVVDIEKSAMRFIQRMTKQDTYLPTEKVLPKNSLLYQKYMIFNELTKVSYKDERGVKQYFSGDEKQQIFKQLFQKERGKITVKKLQNFLYTHYHIENAQIFGIEKAFNASYSTYHDFMKLAKTNEWLEQPEMEPIFEDIVKILTIFEDRQMIKHQLSKYQEVFGEKLLKEFARKHYTGWGRFSAKLIHGIRDRKTNKTILDYLIDDDVPANRNRNLMQLINDEHLSFKEEIAKATVFSKHKSLVDVIQDLPGSPAIKKGIWQSLKIVEELIAIIGYKPKNIVIEMARENQKTHRTSPRLKALENGLKQIGSTLLKEQPTDNKALQKERLYLYYLQNGRDMYTGEPLEIENLHQYEVDHIIPRSFIVDNSIDNKVLVASKQNQKKRDDVPKKQIVNEQRIFWNQLKEAKLISPKKYAYLTKIELTPEDKARFIQRQLVETRQITKHVANILHQSFNQEEEGTDCDGVQIITLKATLTSQFRQTFGLYKVREINPHHHAHDAYLNGFIANVLLKRYPKLAPEFVYGKYVKYSLARENKATAKKEFYSNILKFLESDEPFCDENGEIYWEKSHHLPRIKKVLSSHQVNVVKKVEQQKGGFYKETVNSKEKPDKLIERKNNWDVTKYGGFGSPVIAYAIAFVYAKGKTQKKTRAIEGITIMEQAAFEKDPTTFLKEKGFPQVTEFIKLPKYTLFEFDNGRRRFLASKESQKGNPFILSDQLVTLLYHAQHYDKITYQESFDYVNTHLSDFSAILTEVLAFAEKYTLADKNIERIQELYEENKYGETSMIAQSFLQLLQFNAIGAPADFKFFGVTIPRKRYTSLTEIWDATIIYQSVTGLYETRIRMGDLWAGEQ

SEQ ID NO: 222 - protein, 1329 aa, Enterococcus faecium
MTKDYTIGLDIGTNSVGWAVLTDDYQLMKRKMSVHGNTEKKKIKKNFWGARLFDEGQTAEFRRTKRTNRRRLARRKYRLSKLQDLFAEELCKQDDCFFVRLEESFLVPEEKQYKPASIFPTLEEEKEYYQKYPTIYHLRQKLVDSTEKEDLRLVYLALAHLLKYRGHFLFEGDLDTENTSIEESFRVFLEQYGKQSDQPLIVHQPVLTILTDKLSKTKKVEEILKYYPTEKINSFFAQCLKLIVGNQANFKRIFDLEAEVKLQFSKETYEEDLESLLEKIGDEYLDIFLQAKKVHDAILLSEIISSTVKHTQAKLSSGMVERYERHKADLAKFKQFVKENVPQKATVFFKDTTKNGYAGYIKGKTTQEEFYKFVKKELSGVVGSEPFLEKIDQETFLLKQRTYTNGVIPHQVHLIELKAIIDQQKQHYPFLEEAGPKIIALFKFRIPYYVGPLAKEQEASSFAWIERKTAEKINPWNFSEVVDIEKSAMRFIQRMTKQDTYLPTEKVLPKNSLLYQKYMIFNELTKVSYKDERGVKQYFSGDEKQQIFKQLFQKERGKITVKKLQNFLYTHYHIENAQIFGIEKAFNASYSTYHDFMKLAKTNEWLEQPEMEPIFEDIVKILTIFEDRQMIKHQLSKYQEVFGEKLLKEFARKHYTGWGRFSAKLIHGIRDRKTNKTILDYLIDDDVPANRNRNLMQLINDEHLSFKEEIAKATVFSKHKSLVDVIQDLPGSPAIKKGIWQSLKIVEELIAIIGYKPKNIVIEMARENQKTHRTKPRLKALENGLKQIGSTLLKEQPTDNKALQKERLYLYYLQNGRDMYTGEPLEIENLHQYEVDHIIPRSFIVDNSIDNKVLVASKQNQKKRDDVPNKQIVNEQRIFWNQLKEAKLISPKKYAYLTKIELTPEDKARFIQRQLVETRQITKHVANILHQSFNQEEEGTDCDGVQIITLKATLTSQFRQTFGLYKVREINPHHHAHDAYLNGFIANVLLKRYPKLAPEFVYGKYVKYSLARENKATAKKEFYSNILKFLESDEPFCDENGEIYWEKSHHLPRIKKVLSSHQVNVVKKVEQQKGGFYKETVNSKEKPDKLIERKNNWDVTKYGGFGSPVIAYAIAFVYAKGKTQKKTRAIEGITIMEQAAFEKDPTTFLKDKGFPHVTEFIKLPKYTLFEFDNGRRRFLASKESQKGNPFILSDQLVTLLYHAQHYDKITYQESFDYVNTHLSDFSAILTEVLAFAEKYTLADKNIERIQELYEENKYGEISMIAQSFLQLLQFNAIGAPADFKFFGVTIPRKRYTSLTEIWDATIIYQSVTGLYETRIRMGDLWAGEQ

SEQ ID NO: 223 - protein, 1324 aa, Enterococcus italicus
MKNDYTIGLDIGTNSVGYSVVTDDYKVISKKMNVFGNTEKKSIKKNFWGVRLFESGQTAQEARMKRTSRRRIARRKNRICYLQEIFQPEMNHLDNNFFYRLNESFLVADDAKYDKHPIFGTLDEEIHFHEQFPTIYHLRKYLADGDEKADLRLVYLAIAHIIKFRGNFLIEGELNTENNSVIELSKVFVQLYNQTLSELEFIDESIDFSEVLTQQLSKSERADNVLKLFPDEKGTGIFAQFIKLIVGNQGNFKKVFQLEEDQKLQLSTDDYEENIENLLAIIGDEYGDIFVAAQNLYQAILLAGILTSTEKTRAKLSASMIQRYEEHAKDLKLLKRFVKEHIPDKYAEIFNDATKNGYAGYIDGKTKEEEFYKYLKTTLVQKSGYQYFIEKIEQENFLRKQRIYDNGVIPHQVHAEELRAILRKQEKYYSFLKENHEKIEQIFKVRIPYYVGPLAKHNEQSRFAWNIRKSDEPIRPWNMNDVVDENASAVAFIERMTIKDIYLNENVLPRHSLIYEKFTVFNELTKVLYADDRGVFQRFSAEEKEDIFEKLFKSERKVTKKKLENYLRIELSISSPSVKGIEEQFNANFGTYLDLKKFDELHPYLDDEKYQDTLEEVIKVLTVFEDRSMIQNQLEQLPLNLSTKTIKALSRRKYTGWGRLSARLIDGIHDKNSGKTILDYLIDESDSYIVNRNFMQLINDDHLSFKKIIEDSQPYKEQQSAEEIVSELSGSPAIKKGILQSLKIVDELVAIMGYKPKNIVVEMARENQTTGRGKQNSKPRLKGIENGLKEFSDSVLKGSSIDNKQLQNDRLYLYYLQNGKDMYTGHELDIDHLSTYDIDHIIPQSFLTDNSIDNRVLTTSKSNRGKSDNVPSEEVVRKMDRFWRKLLNAKLISERKYTNLTKKELTESDKAGFLKRQLVETRQITKHVATILDSKFNEDSNNRDVQIITLKSALVSEFRKTFNLYKVREINDLHHAHDAYLNAVVALSLLRVYPQLKPEFVYGEYGKNSIHDQNKATIKKQFYSNITRYFASKDIINDDGEILWNKQETIAQVIKTLGMHQVNVVKKVEIQKGGFSKESIQPKGESQKLIRRKQQWNTKKYGGFDSPVVAYAILLSFDKGKRKARSFKIVGITIQDRESFEGNPILYLSKKDYHNPKVEAILPKYSLFEFENGRRRMVASSETQKGNQLIIPGHLMELLYHSKKIINGKNSDSVSYIQNNKEKFREIFEYIVDFSSKYISADANLNKIEKIFENNFHKASEQEIAKSFINLLTFTAMGAPADFEFFGEKIPRKRYVSISEIIDAVFIHQSITGLYETRVRLTEV

SEQ ID NO: 224 - protein, 1323 aa, Enterococcus mundtii
MEKEYTIGLDIGTNSVGWAVLTDDYRLVARKMSIQGDSNRKKIKKNFWGARLFEEGKTAQFRRIKRTNRRRIARRRQRVLALQDIFAEEIHKKDPNFFARLEEGDRVEADKRFAKFPVFATLSEEKNYHRQYPTIYHLRHDLANSKEQADIRLVYLAIAHCLKYRGHFLFEGELDTENTSVTENYQQFLQAYQQFFPEPIGDLDDAVPILTERLSKAKRVEKVLAYYPSEKSTGNFAQFLKLMVGNQANFKKTFDLEEEMKLNFTRDCYEEDLNELLEKTSDDYAELFLKAKGVYDAILLSQILSKSDDETKAKLSANMKLRFEEHQRDLKQLKELVRRDLPKKYDDFFKNRSKNGYAGYVKGKATQEDFYKFLRTELAGLEESQSIMEKIDLEIYLLKQRTFANGVIPHQIHLVEMREIMDRQKRFYPFLKGAQGKIEKLLTFRIPYYVGPLAQEGQSPFAWIKRKSPSQITPWNFAEVVDKENSAIEFIERMTNQDTYLPKEKVLPKQSLIYQRFMIFNELTKVSYTDERGKSHYFSSEQKRKIFNELFKQHPRVTEKQLRKFLELNEQIDSTEIKGIETSFNASYSTYHDLLKLSTLLDDPDMTTMFEEIIKILTIFEDREMIREQLKPYETVLGLPAIKKLAKKHYTGWGRLSEKMIQGMREKQSRKTILDYLIDDDFPCNRNRNFMQLINDDHLSFKETIANELIMSDSNVLLDQVKAIPGSPAVKKGIWQSIKIVEEIIGIIGKAPKNIVIEMARENQRTSRSRPRLKALEEALKNIDSPLLKDYPTDNQALQKDRLYLYYLQNGKDMYTGEPLEIHRLSEYDIDHIIPRSFIVDNSLDNKVLVSSKVNRGKLDNAPDPLVVKRMRSHWEKLHQAKLISDKKLANLTKQNLTEADKARFIQRQLVETRQITKHVANLLHQHFNLPEEVSATEKTSIITLKSTLTSQFRQMFDIYKVREINHHHHAHDAYLNGVVAMTLLKKYPKLAPEFVYGSYIKGDINQINKATAKKEFYSNIMKFFESEEIICDEQGEVIWNKKRDLSTIKKTIGAHQVNIVKKVEKQKGGFYKETINSKANPEKLIPRKASLDPLKYGGYGSPLVAYTVIFIFEKGKQKKVTKGIEGITVMEQLRFEQDPREFLKTKGYEGVKQWLILPKYILFEAQGGYRRMIASQETQKANSLILPENLVTLLYHARHYDEINHKVSFDYVNAHKEGFNDIFDFISDFGVRYILAPQHLEKIKVAYEKNKEVDLKEMIDAILSLLKFTLFGASVEFKFFDIKILKRYKSLTDIWEATIIYQSVTGLYERRVEVRKLWDGER

SEQ ID NO: 225 - protein, 1330 aa, Enterococcus phoeniculicola
MKKEYTIGLDIGTNSVGWAVLTENYDLVKKKMKVYGNTETKYLKKNLWGVRLFDEGETAADRRLKRTTRRRYSRRRNRICRLQDLFTEEMNQVDANFFHRLQESFLVPDEKEFERHAIFGKMEEEVSYYREFPTIYHLRKHLADTSEQADLRLVYLALAHIVKYRGHFLIEGELNTENSSVSETFRTFIQVYNQIFRENEPLAVPDNIEELFSEKVSRARKVEAILSVYSEEKSTGTLAQFLKLMVGNQGRFKKTFDLEEDGIIQIPKEEYEEELETLLAIIGDEYAEIFSATKSVYDAVALSGILSVTDGDTKAKLSASMVERYEAHQKDLVQFKQFIRKELPEMYAPIFRDNSVSGYAGYVENSVTQAEFYKYIKKAIEKVPGAEYFLEKIEQETFLDKQRTFNNGVIPHQIHLEELEAIIQKQATYYPFLADNKEEMKQLVTFRIPYYVGPLADGNSPFAWLERISSEPIRPGNLAEVVDIKKSATKFIERMTNFDTYLPTEKVLPKHSMIYEKYMVYNELTKVSYVDERGMNQRFSGEEKKQIVEELFKQSRKVTKKLLEKFLSNEFGLVDVAIKGIETSFNAGYGTYHDFLKIGITREQLDKEENSETLEEIVKILTVFEDRKMIREQLKKYTYLFDEEVLKKLERRHYTGWGRLSAKLLIGIKEKRTHKTILDYLIDDGGKQPINRNLMQLINDSDLSFKSEIAEAQSDMNTEDLHEVVQNLAGSPAIKKGILQSLKIVDELVDIMGSLPKNIVVEMARENQTTSRGRTNSNPRMKALEEAMRNLRSNLLKEYPTDNQALQNDRLYLYYLQNGKDMYTGLDLSLHNLSSYDIDHIVPQSFTTDNSLDNRVLVSSKENRGKKDDVPSKEVVQKNITLWETLKNSNLISQKKYDNLTKGLRGGLTEDDRAHFIKRQLVETRQITKHVARILDQRFNSQKDEEGKTIRAVRVVTLKSSLTSQFRKQFAIHKVREINDYHHGHDAYLNGVVANSLLRVYPQLQPEFVYGDYPKFNAYKANKATAKKQLYTNIMKFFAEDAVIIDENGEILWDKKNIATVKKVMSYPQMNIVKKPEIQTGSFSKETIKPKGDSDKLISRKTNWSPKLYGGFDSPQVAYSVIITYEKGKKKVRAKAIVGITIMEQSLFKKDPVSLLEEKGYANPEVLIHLPKYTLYELENGRRRLLASANEAQKGNQLVLPASLVTLLYHAKQVDEDSGKSEEYVREHRAEFAEILNYVQAFSETKILANKNLQTILKLYEENKEADIKEIAESFVNLMKFSAYGAPMDFKFFGKTIPRSRYTSVGELLSATIINQSITGLYETRRKLVD

SEQ ID NO: 226 - protein, 1327 aa, Enterococcus sp. AM1
MGKEYTIGLDIGTNSVGWAVLQEDLDLVRRKMKVYGNTEKNYLKKNFWGVDLFDEGMTAKDTRLKRTTRRRYFRRRQRISYLQTFFQEEMNRIDPNFFNRLDESFLIEEDKLSERHPIFGTIEEEVAYHKNYATIYHLRKELADAEEKADLRLVYLALAHIIKYRGHFLIEGRLSTENTSTEETFKTFLQKYNQTFNPVDETISIGSIFADKVSRAKKAEGVLALFPDEKRNGTFDQFLKMIVGNQGNFKKTFELEEDAKLQFSKEEYDESLEALLGEIGDEYADVFEAAKNVYNAVELSGILTVTDNSTKAKLSASMIKRYEDHKTDLKLFKEFIRKNLPEKYHEIFNDKNTDGYAGYIDNSTSQEKFYKYITNLIEKIDGAEYFLKKIENEDFLRKQRTFDNGIIPHQIHLEELKAILHHQAMYYPFLQEKFSNFVDLLTFRIPYYVGPLANGNSRFSWLSRKSDEPIRPWNLAEVVDLSKSAELFIERMTNFDLYLPSEKVLPKHSMLYEKYTVYNELTKVTYKDEQGKVQNFSSEEKERIFIDLFKQHRKVTKKDLSNFLRNEYNLDDVIIDGIENKFNASFNTYHDFLKLKIDPKVLDDPANEPMFEEIVKILTIFEDRKMLREQLSKFSDRLSEKTIKDLERRHYTGWGRLSAKLINGIHDKQSNKTILDYLIDDAPKKNINRNFMQLINDNRLTFKEEIEKEQLKANSEESLIEIVQNLAGSPAIKKGIFQSLKIVDELVEIMGYAPTNIVVEMARENQTTANGRRNSRPRLKNLEKAIDDLDSEILKKHPVDNKALQKDRLYLYYLQNGKDMYTNEELDIHKLSTYDIDHIIPQSFIVDNSLDNRVLVSSSKNRGKLDDVPSKEVVKKMRAFWESLYRSGLISKKKFDNLVKAESGGLSEDDKAGFIHRQLVETRQITKNVARILHQRFNSEKDEEGNLIRKVRIITLKSALTSQFRKNYGIYKIREINDYHHAHDAYLNGVVATALLKIYPQLEPEFVYGEFHRFNAFKENKATAKKQFYSNLMEFSKSDKVIIDENGEILWNQKKIVTVKKVMNYRQMNIVKKVEIQKGGFSKESILPKGDSDKLISRKKEWDTTKYGGFDSPNVAYSVVIRYEKGKTRKLVKTIVGITIMERAAFEKNEREFLKNKGYQNPQICMKLPKYSLYEFDDGRRRLLASAKEAQKGNQMVLPAHLVTFLYHAKHCNEKPDSLKYVTEHQSGFSEIMAHVKDFAEKYTLVDKNLEKILSLYAKNMDSEVKEIAQSFVDLMQLNAFGAPADFKFFGETIPRKRYTSVNELLEATIINQSITGLYETRRRLGD

SEQ ID NO: 227 - protein, 1332 aa, Enterococcus villorum
MNKAYTLGLDIGTNSVGWAVVTDDYRLMAKKMPVHSKMEKKKIKKNFWGARLFDEGQTAEERRNKRATRRRLRRRKYRILELQKIFSEEILKKDSHFFARLDESFLIPEDKQYARFPIFPTLLEEKAYYQNYPTIYHLRQKLADSTEKADIRLVYLALAHMIKYRGHFLFEGELDTENTSVEETFKEFIDIYNEQFEEGIIFYKDIPLILTDKLSKSKKVEKILQYYPKEKTTGCLAQFLKLIVGNQGNFKQAFHLDEEVKIQISKETYEEDLEKLLRKSNEEMIDVFLQVKKVYDAILLSDILSTKMKDTKAKLSAGMIERYQNHKKDLEELKQFVRAHLHEKVTVFFKDSSKDGYAGYIDGKTTQADFYKFLKKELTGVPGSEPMLAKIDQENFLLKQRTPTNGVIPHQVHLTEFKAIIDQQKQYYPFLEKSKEKMIQLLTFRIPYYVGPLAQDKETSSFAWLERKTTEKIKPWNAKDVIDYGASATKFIQRMINYDTYLPTEKVLPKYSMLYQKYTIFNELTKVAYKDDRGIKHQFSSEEKLRIFQELFKKQRRVTKKKLQHFLSANYNIEDAEILGVDKVFNSSYATYHDFLELAKPYELLEQPEMEEMFEDIVKIITIFEDREMVRTQLKKYQRILGEEIFKKLVKKKYTGWGRLSKRLINGIRDQKTNKTILDYLIDDDFPYNRNRNFMQLINDDHLSFKEEIAKELTLSDKQSLLEVVEAIPGSPAIKKGIWQTLKIVEELIAIIGYKPKNIVIEMARENQTTTGGKNRSKPRLKSLEEALKNFDSQLLKERPVDNQSLQKDRLYLYYLQNGKDMYTGESLDIDRLSEYDIDHIIPRSFIVDHSLDNKVLVSSKENRLKKDDVPDSKVVKRMKAYWEKLLRANLISERKFSYLTKLELTDDDKARFIQRQLVETRQITKHVAAILHQYFNQTQELEKEKDIRIITLKSSLVSQFRQVFGIHKVREINHHHHAHDAYLNAVVALALLKKYPRLAPEFVYGSFAKFHLVKENKATAKKEFYSNILKFFEKEEQFCDENGEIFWDKRKHIQQIKKVISSHQVNIVKKVEVQTGSFYKETVNTKEKPDKLIKRKNNWDVTKYGGFGSPVVAYAVVFTYEKGKNHKKAKAIEGITIMEQALFEKDPISFLIEKGYSNVNQFIKLPKYTLFELANGQRRMLASQELQKANSFILPEKLVTLLYHANHYDEIAYKDSYDYVNEHFSNFQDILDKVIIFAEKYTSAPQKLNQIIATYEKNQEADRKIMAHSFVNLMQFNALGAPADFKFFDTTITRKRYTSLTEIWQSTIIYQSVTGLYETRRRMADLWDGVQ

SEQ ID NO: 228 - protein, 1359 aa, Artificial Sequence
  Synthetic Polypeptide
ADKKYSIGLDIGTNSVGWAVITDEYKVPSKKFKVLGNTDRHSIKKNLIGALLFDSGETAEATRLKRTARRRYTRRKNRICYLQEIFSNEMAKVDDSFFHRLEESFLVEEDKKHERHPIFGNIVDEVAYHEKYPTIYHLRKKLVDSTDKADLRLIYLALAHMIKFRGHFLIEGDLNPDNSDVDKLFIQLVQTYNQLFEENINASGVDAKAILSARLSKSRRLENLIAQLPGEKKNGLFGNLIALSLGLTPNFKSNFDLAEDAKLQLSKDTYDDDLDNLLAQIGDQYADLFLAAKNLSDAILLSDILRVNTEITKAPLSASMIKRYDEHHQDLTLLKALVRQQLPEKYKEIFFDQSKNGYAGYIDGGASQEEFYKFIKPILEKMDGTEELLVKLNREDLLRKQRTFDNGSIPHQIHLGELHAILRRQEDFYPFLKDNREKIEKILTFRIPYYVGPLARGNSRFAWMTRKSEETITPWNFEEVVDKGASAQSFIERMTNFDKNLPNEKVLPKHSLLYEYFTVYNELTKVKYVTEGMRKPAFLSGEQKKAIVDLLFKTNRKVTVKQLKEDYFKKIECFDSVEISGVEDRFNASLGTYHDLLKIIKDKDFLDNEENEDILEDIVLTLTLFEDREMIEERLKTYAHLFDDKVMKQLKRRRYTGWGRLSRKLINGIRDKQSGKTILDFLKDGFANRNFMQLIHDDSLTFKEDIQKAQVSGQGDSLHEHIANLAGSPAIKKGILQTVKVVDELVKVMGRHKPENIVIEMARENQTTQKGQKNSRERMKRIEEGIKELGSQILKEHPVENTQLQNEKLYLYYLQNGRDMYVDQELDINRLSDYDVDHIVPQSFLKDDSIDNKVLTRSDKNRGKSDNVPSEEVVKKMKNYWRQLLNAKLITQRKFDNLTKAERGGLSELDKAGFIKRQLVETRQITKHVAQILDSRMNTKYDENDKLIREVKVITLKSKLVSDFRKDFQFYKVREINNYHHAHDAYLNAVVGTALIKKYPKLESEFVYGDYKVYDVSEQEIGKATAKYFFYSNIMNFFKTEITLANGEIRKRPLIETNGETGEIVWDKGRDFATVRKVLSMPQVNIVKKTEVQTGGFSKESILPKRNSDKLIARKKDWDPKKYGGFDSPTVAYSVLVVAKVEKGKSKKLKSVKELLGITIMERSSFEKNPIDFLEAKGYKEVKKDLIIKLPKYSLFELENGRKRMLASGELQKGNELALPSKYVNFLYLASHYEKLKGSPEDNEQKQLFVEQHKHYLDEIIEQISEFSKRVILADANLDKVLSAYNKHRDKPIREQAENIIHLFTLTNLGAPAAFKYFDTTIDRKRYTSTKEVLDATLIHQSITGLYETRIDLSQLGGD

SEQ ID NO: 229 - protein, 1300 aa, Kandleria vitulina
NNKIYNIGLDIGDASVGWAVVDEHYNLLKRHGKHMWGSRLFTQANTAVERRSSRSTRRRYNKRRERIRLLRGIMEDMVLDVDPTFFIRLANVSFLDQEDKKDYLKSNYNLFIDKDFNDKTYYDKYPTIYHLRKHLCESKEKEDPRLIYLALHHIVKYRGNFLYEGQKFSMDVSNIEDKMIDVLRQFNEINLFEYVEDKKIDEVLNVLKEPLSKKHKADKAFALFDTTKDNKAAYKELCAALAGNKFNVTKMLKEAELHDEDEKDISFKFSDATFDDAFVEKQPLLGDCVEFIDLLHDIYSWVELQNILGSAHTSEPSISAAMIQRYEDHKNDLKLLKDVIRKYLPKKYFEVFRDEKSKKNNYCNYINHKTPVDEFYKYIKKLIEKIDDPDVKTILNKIELESFMLKQNSRTNGAVPYQMQLDELNKILENQSVYYSDLKDNEDKIRSILTFRIPYYFGPLITKDRQFDWIIKKEGKENERILPWNANEIVDVDKTADEFIKRMRNFCTYFPDEPVLAKNSLTVSKYEVLNEINKLRINDHLIKRDIKDKMLHTLFMDHKSISANAMKKWLVKNQYFSNTDDIKIEGFQKENACSTSLTPWIDFTKIFGEINNSNYELIEKIIYDVTVFEDKKILRRRLKKEYDLDEEKIKKILKLKYSGWSRLSKKLLSGIKTKRTPETVLEVMETNMNLMQVINDEKLGFKKTIDDANSTSVSGKFSYAEVQELAGSPAIKRGIWQALLIVDEIKKIMKHEPAHVYIEFARNEDKERKDSFVNQMLKLYKDFEDEANKHLKGEDAKSKIRSERLKLYYTQMGKCMYTGKSLDIDRLDTYQVDHIVPQSLLKDDSIDNKVLVLSSENQRKLDDLVIPEMIRNKMFGFWNKLYENKIISPKKFYSLIKSEYSDKDKERFINRQIVETRQITKHVAQIISNHYETTKVVTVRADLSHAFRERYHIYKNRDINDFHHAHDAYIATILGTYIGHRFESLDAKYIYGEYQKIFRNKNKDKKDGFILNSMRNLYADKDTGEVVWDPEWISRIKKCFYYKDCFVTKKLEENNGSFFNTVRPNDEHSEKGAKVPVNKLRSNVHKYGGFEGLKYSIVAIKGKKKKGKKIIDVNKLVGIPLMYKNVDDETKINYIKESEGLEEVKIIKEILKNQLIEINGGLFYVTSEIVNARQLILDFNCTRIIDGIYKAMKYKNYSELSQEEIMNVYDIFVEKLKLYYPTYKNIATNFENFENISDEEKCEVIQMLVVMHAGPQNGNITFDDFKLSNRLGRLNCKTISLTTVFIADSPTGMYSKKYKL

SEQ ID NO: 230 - protein, 1301 aa, Kandleria vitulina
NNKIYNIGLDIGDASVGWAVVDEHYNLLKRHGKHMWGSRLFTQANTAVERRSSRSTRRRYNKRRERIRLLREIMEDMVLDVDPTFFIRLANVSFLDQEDKKDYLKSNYNLFIDKDFNDKTYYDKYPTIYHLRKHLCESKEKEDPRLIYLALHHIVKYRGNFLYEGQKFSMDVSNIEDKMIDVLRQFNEINLFEYVEDKKIDEVLNVLKEPLSKKHKAEKAFALFDTTKDNKAAYKELCAALAGNKFNVTKMLKEAELHDEDEKDISFKFSDATFDDAFVEKQPLLGDCVEFIDLLHDIYSWVELQNILGSAHTSEPSISAAMIQRYEDHKNDLKLLKDVIRKYLPKKYFEVFRDEKSKKNNYCNYINHKTPVDEFYKYIKKLIEKIDDPDVKTILNKIELESFMLKQNSRTNGAVPYQMQLDELNKILENQSVYYSDLKDNEDKIRSILTFRIPYYFGPLITKDRQFDWIIKKEGKENERILPWNANEIVDVDKTADEFIKRMRNFCTYFPDEPVMAKNSLTVSKYEVLNEINKLRINDHLIKRDMKDKMLHTLFMDHKSISANAMKKWLVKNQYFSNTDDIKIEGFQKENACSTSLTPWIDFTKIFGKINESNYDFIEKIIYDVTVFEDKKILRRRLKKEYDLDEEKIKKILKLKYSGWSRLSKKLLSGIKTKRTPETVLEVMETNMNLMQVINDEKLGFKKTIDDANSTSVSGKFSYAEVQELAGSPAIKRGIWQALLIVDEIKKIMKHEPAHVYIEFARNEDKERKDSFVNQMLKLYKDFEDEANKHLKGEDAKSKIRSERLKLYYTQMGKCMYTGKSLDIDRLDTYQVDHIVPQSLLKDDSIDNKVLVLSSENQRKLDDLVIPSSIRNKMYGFWEKLFNNKIISPKKFYSLIKTEFNEKDQERFINRQIVETRQITKHVAQIIDNHYENTKVVTVRADLSHQFRERYHIYKNRDINDFHHAHDAYIATILGTYIGHRFESLDAKYIYGEYKRIFRQKNKGKNDGFILNSMRNIYADKDTGEIVWDPNYIDRIKKCFYYKDCFVTKKLEENNGTFFNTVLPNDTNSDKDATVPVNKYRSNVNKYGGFSGVNSFIVAIKGKKKKGKKVIEVNKLTGIPLMYKNADEEIKINYLKQAEDLEEVQIGKEILKNQLIEKDGGLYYIVAEIINAKQLILNESQTKLVCEIYKAMKYKNYDNLDSEKIIDLYRLLINKMELYYPEYRKQLVKKFEDLKVISIEEKCNIIQILATLHCNSSIGKIMYSDFKISTTIGRLNGRTISLDISFIAESPTGMYSKKYKL

SEQ ID NO: 231 - protein, 1304 aa, Lactobacillus animalis
LKKDYSIGLDIGTNSVGHAVVTDDYKVPTKKMKVFGDTSKKTIKKNMLGVLLFNEGQTAADTRLKRGARRRYTRRKNRLRYLQEIFAPALAKVDPNFFYRLEESSLVAEDKKYDVYPIFGKREEELLYHDTHKTIYHLRSELANNDRPADLRLVYLALAHIIKYRGNFLLEGEIDLRTTDINKVFAEFSETLNENSDENLGKLDVADIFKDNTFSKTKKSEELLKLSGKKNQLAHQLFKMMVGNMGSFKKVLGTDEEHKLSFGKDTYEDDLNDLLAEAGDQYLDIFVAAKKVYDAAILASILDVKDTQTKTVFSQAMIERYEEHQKDLIELKRVFKKYLPEKCHDFFSEPKISGYAGYIDGKVSEEDFYKYTKKTLKGIPETEEILQKIDANNYLRKQRTFDNGAIPHQVHLKELVAIVENQGKYYPFLRENKDKFEKILNFRIPYYVGPLARGNSKFAWLTRAGEGKITPYNFDEMIDKETSAEDFIKRMTINDLYLPTEPVLPKHSLLYERYTIFNELAGVRYVTENGEAKYFDAQTKRSIFELFKLDRKVSEKMVIKHLKVVMPAIRIQALKGLDNGKFNASYGTYKDLVDMGVAPELLNDEVNSEKWEDIIKTLTIFEGRKLIKRRLENYRDFLGEDILRKLSRKKYTGWGRLSAKLLDGIYDKKTHKTILDCLMEDYSQNFMQLINDDTYSFKETIKNAQVIEKEETLAKTVQELPGSPAIKKGILQSLEIVDEIIKVMGYKPKSIVVEMARETQTHGTRKREDRVQQIVKNLKELPKPSNAELSDERKYLYCLQNGRDMYTGAPLDYDHLQFYDVDHIIPQSFLKDDSIENKVLTIKKENVRKTNGLPSEAVIQKMGSFWKKLLDAGAMTNKKYDNLRRNLHGGLNEKLKERFIERQLVETRQITKYVAQLLDQRLNYDGNGVELDEKIAIVTLKAQLASQFRSEFKLRKVRALNNLHHAHDAYLNAVVANLIMAKYPELEPEFVYGKYRKTKFKGLGKATAKNTLYANVLYFLKENEVYPFWDKARDLPTIKRYLYRAQVNKVRKAERQTGGFSDEMLVPKSDSGKLLPRKEGLDPVKYGGYAKAVESYAVLITADEVKKGKTKKVKTLVNIPIIDSKKYEADPTAYLASRGYTNVTNSFILPKYSLLEDPEGRRRYLASKEFQKANELILPQHLVELLYWVNAKDGEQKLEDHKAEFKELFDKIMEFADKYVVAPKNSEKIRRLYEENQDATPMELGKNFVELLRYTADGAASDFKFFGENIPRKRYNSAGSLLNGTLIYQSKTGLYETRIDLGKL

SEQ ID NO: 232 - protein, 1292 aa, Lactobacillus curvatus
MSRPYNIGLDIGTSSIGWSVVDDQSKLVSVRGKYGYGVRLYDEGQTAAERRSFRTTRRRLKRRKWRLGLLREIFEPYITPVDDTFFLRKKQSNLSPKDQRKQTSLFNDRTDRAFYDDYPTIYHLRYKLMTEKRQFDIREIYLAMHHIVKYRGHFLNEAPVSSFKSSEINLVAHFDRLNTIFADLFSESGFTDKLAEVKALLLDNHQSASNRQRQALLLIYTPSKQNKAIATELLKAILGLKAKFNVLTGIEAEDVKTWTLTFNAENFDEEMVKLESSLDDNAHQIIESLQELYSGVLLAGIVPENQSLSQAMITKYDDHQKHLKMLKAVREALAPEDRQRLKQAYDQYVDGKSKEDFYGDITKALKNNPDHPIVSEIKKLIELDQFMPKQRTKDNGAIPHQLHQQELDRIIENQQQYYPWLAELNPNKLDELVAFRVPYYVGPLQQQSSDAKFAWMIRKAEGQITPWNFDDKVDRQASANEFIKRMTTTDTYLLAEDVLPKQSLIYQRFEVLNELNGLKIDDQPITTELKQAIFTDLFMQKTSVTVKNIQDYLVSEKRYASRPAITGLSDENKFNSRLSTYHDLKTIVGDAVDDVDKQADLEKCIEWSTIFEDGKIYSAKLNEIDWLTDQQRVQLAAKRYRGWGRLSAKLLTQIVNANGQRIMDLLWTTDNFMRIVHSEDFDKLITEANQMMLAENDVQDVINDLYTSPQNKKALRQILLVVNDIQKAMKGQAPERILIEFAREDEVNPRLSVQRKRQVEQVYQNISELEIRNELKDLSNSALSNTRLFLYFMQGGRDMYTGDSLNIDRLSTYDIDHILPQSFIKDNSLDNRVLVSQRMNRSKADQVPSVELGQKMQIQWEQMLRAGLITKKKYDNLTLNPDMKGFINRQLVETRQVIKLATNLLMEQYGEDNIELITVKSGLTHQMRTEFDFPKNRNLNNHHHAFDAYLTAFVGLYLLKRYPKLKPYFVYGEYQKASQQDKRNFNFLNGLKKDELVDENTEAVIWNKESGLAYLNKIYQFKKILVTREVHENSGALFNQTLYAAKDDKASGQLIPAKQDRPTALYGGYSGKTVAYMCIVRIKNKKGDLYKVCGVETSWLAQLKQKKAFLKQKISPQFTKVKKQKGTIVKVVEDFEVIAPHILINQRFFDNGQELTLGSHNEQELILDKTAVKLLNGALPLTQSEELAEQVYDEILDQVMHYFPLYDTNQFRAKLSAGKAADGNKMVQVGQQVILDRVLIGLHANAAVSDLGVLKISTPLGKMQQPSGISDTQIIYQSPTGLFERRVALRDL

SEQ ID NO: 233 - protein, 1291 aa, Lactobacillus farciminis
KEQPYNIGLDIGTGSVGWAVTNDNYDLLNIKKKNLWGVRLFEGAQTAKETRLNRSTRRRYRRRKNRINWLNEIFSEELANTDPSFLIRLQNSWVSKKDPDRKRDKYNLFIDNPYTDKEYYREFPTIFHLRKELIINKNKADIRLVYLALHNILKYRGNFTYEHQKFNISTLNSNLSKELIELNQQLIKYDISFPDNCDWNHISDILIGRGNATQKSSNILNNFTKETKKLLKEVINLILGNVAHLNTIFKTSLTKDEEKLSFSGKDIESKLDDLDSILDDDQFTVLDTANRIYSTITLNEILNGESYFSMAKVNQYENHAIDLCKLRDMWHTTKNEKAVGLSRQAYDDYINKKKELYTSLKKFLKVALPTNLAKEAEEKISKGTYLVKPRNSENGVVPYQLNKIEMEKIIDNQSQYYPFLKENKEKLLSILSFRIPYYVGPLQSSEKNPFAWMERKSNGHARPWNFDEIVDREKSSNKFIRRMTVTDSYLVGEPVLPKNSLIYQRYEVLNELNNIRITENLKTNPTGSRLTVETKQHIYNELFKNYKKITVKKLTKWLIAQGYYKNPILIGLSQKDEFNSTLTTYLDMKKIFGSSFMENNKNYNQIEELIEWLTIFEDKQILNEKLHSSNYSYTSDQIKKISNMRYKGWGRLSKKILTCITTETNTPKSLQLSNDLMWTTNNNFISIISNDKYDFKNYIENHNLNKNEDQNISNLVNDIHVSPALKRGITQSIKIVQEIVKFMGHAPKYIFIEVTRETKTTSRGKRIQRLQSKLLNKANGLVPEELKKHKNDLSSERIMLYFLQNGKSLYSEESLNINKLSDYQVDHILPRTYIPDDSLENKALVLAKENQRKADDLLLNSNVIDKNLERWTYMLNNNMMGLKKFKNLTRRVITDKDKLGFIHRQLVQTSQMVKGVANILNSMYKNQGTTCIQARANLSTAFRKALELVKNRNINDFHHAQDAYLASFLGTYRLRRFPTDEMLLMNGEYNKFYGKELYSKKSRKNGFIISPLVNGTTQDRNTGEIIWNVGFRDKILKIFNYHQCNVTRKTEIKTGQFYDQTIYSPKNPKKLIAQKKDMDPNIYGGFSGDNKSSITIVKIDNNKIKPVAIPIRLINDKKTLQNWLEENVKHKKSIQIIKNNVPIGQIIYSKKVGLLSREIANRQQLILPPEHSALLRILQIPDEDPDQILAFYDKNILVEILQELITKMKKFYPFYKNEQEFLASFNQATTSEKINSLEELITLLHANSTSAHLIFNNIEKKAFGRKTHGLTDTDFIYQSVTGLYETRIHIE

SEQ ID NO: 234 - protein, 1327 aa, Listeria innocua
MKKPYTIGLDIGTNSVGWAVLTDQYDLVKRKMKIAGDSEKKQIKKNFWGVRLFDEGQTAADRRMARTARRRIERRRNRISYLQGIFAEEMSKTDANFFCRLSDSFYVDNEKRNSRHPFFATIEEEVEYHKNYPTIYHLREELVNSSEKADLRLVYLALAHIIKYRGNFLIEGALDTQNTSVDGIYKQFIQTYNQVFASGIEKLEDNKDVAKILVEKVTRKEKLERILKLYPGEKSAGMFAQFISLIVGSKGNFQKPFDLIEKSDIECAKDSYEEDLESLLALIGDEYAELFVAAKNAYSAVVLSSIITVAETETNAKLSASMIERFDTHEEDLGELKAFIKLHLPKHYEEIFSNTEKHGYAGYIDGTKQADFYKYMKMTLENIEGADYFIAKIEKENFLRKQRTFDNGAIPHQLHLEELEAILHQQAKYYPFLKENYDKIKSLVTFRIPYFVGPLANGQSEFAWLTRKADGEIRPWNIEEKVDFGKSAVDFIEKMTNKDTYLPKENVLPKHSLCYQKYLVYNELTKVRYINDQGKTSYFSGQEKEQIFNDLFKQKRKVKKKDLELFLRNMSHVESPTIEGLEDSFNSSYSTYHDLLKVGIKQEILDNPVNTEMLENIVKILTVFEDKRMIKEQLQQFSDVLDGVVLKKLERRHYTGWGRLSAKLLMGIRDKQSHLTILDYLMDDGLNRNLMQLINDSNLSFKSIIEKEQVTTADKDIQSIVADLAGSPAIKKGILQSLKIVDELVSVMGYPPQTIVVEMARENQTTGKGKNNSRPRYKSLEKAIKEFGSQILKEHPTDNQELRNNRLYLYYLQNGKDMYTGQDLDIHNLSNYDIDHIVPQSFITDNSIDNLVLTSSAGNREKGDDVPPLEIVRKRKVFWEKLYQGNLMSKRKFDYLTKAERGGLTEADKARFIHRQLVETRQITKNVANILHQRFNYEKDDHGNTMKQVRIVTLKSALVSQFRKQFQLYKVRDVNDYHHAHDAYLNGVVANTLLKVYPQLEPEFVYGDYHQFDWFKANKATAKKQFYTNIMLFFAQKDRIIDENGEILWDKKYLDTVKKVMSYRQMNIVKKTEIQKGEFSKATIKPKGNSSKLIPRKTNWDPMKYGGLDSPNMAYAVVIEYAKGKNKLVFEKKIIRVTIMERKAFEKDEKAFLEEQGYRQPKVLAKLPKYTLYECEEGRRRMLASANEAQKGNQQVLPNHLVTLLHHAANCEVSDGKSLDYIESNREMFAELLAHVSEFAKRYTLAEANLNKINQLFEQNKEGDIKAIAQSFVDLMAFNAMGAPASFKFFETTIERKRYNNLKELLNSTIIYQSITGLYESRKRLDD

SEQ ID NO: 235 - protein, 1327 aa, Listeria innocua
MKKPYTIGLDIGTNSVGWAVLTDQYDLVKRKMKIAGDSEKKQIKKNFWGVRLFDEGQTAADRRMARTARRRIERRRNRISYLQGIFAEEMSKTDANFFCRLSDSFYVDNEKRNSRHPFFATIEEEVEYHKNYPTIYHLREELVNSSEKADLRLVYLALAHIIKYRGNFLIEGALDTQNTSVDGIYKQFIQTYNQVFASGIEKLEDNKDVAKILVEKVTRKEKLERILKLYPGEKSAGMFAQFISLIVGSKGNFQKPFDLIEKSDIECAKDSYEEDLESLLALIGDEYAELFVAAKNAYSAVVLSSIITVAETETNAKLSASMIERFDTHEEDLGELKAFIKLHLPKHYEEIFSNTEKHGYAGYIDGTKQADFYKYMKMTLENIEGADYFIAKIEKENFLRKQRTFDNGAIPHQLHLEELEAILHQQAKYYPFLKENYDKIKSLVTFRIPYFVGPLANGQSEFAWLTRKADGEIRPWNIEEKVDFGKSAVDFIEKMTNKDTYLPKENVLPKHSLCYQKYLVYNELTKVRYINDQGKTSYFSGQEKEQIFNDLFKQKRKVKKKDLELFLRNMSHVESPTIEGLEDSFNSSYSTYHDLLKVGIKQEILDNPVNTEMLENIVKILTVFEDKRMIKEQLQQFSDVLDGVVLKKLERRHYTGWGRLSAKLLMGIRDKQSHLTILDYLMDDGLNRNLMQLINDSNLSFKSIIEKEQVTTADKDIQSIVADLAGSPAIKKGILQSLKIVDELVSVMGYPPQTIVVEMARENQTTGKGKNNSRPRYKSLEKAIKEFGSQILKEHPTDNQELRNNRLYLYYLQNGKDMYTGQDLDIHNLSNYDIDHIVPQSFITDNSIDNLVLTSSAGNREKGDDVPPLEIVRKRKVFWEKLYQGNLMSKRKFDYLTKAERGGLTEADKARFIHRQLVETRQITKNVANILHQRFNYEKDDHGNTMKQVRIVTLKSALVSQFRKQFQLYKVRDVNDYHHAHDAYLNGVVANTLLKVYPQLEPEFVYGDYHQFDWFKANKATAKKQFYTNIMLFFAQKDRIIDENGEILWDKKYLDTVKKVMSYRQMNIVKKTEIQKGEFSKATIKPKGNSSKLISRKTNWDPMKYGGLDSPNMAYAVVIEYAKGKNKLVFEKKIIRVTIMERKAFEKDEKAFLEEQGYRQPKVLAKLPKYTLYECEEGRRRMLASANEAQKGNQQVLPNHLVTLLHHVANCEVSDGKSLDYIESNREMFAELLAHVSEFAKRYTLAEANLNKINQLFEQNKEGDIKAIAQSFVDLMAFNAMGAPASFKFFETTIERKRYNNLKELLNSTIIYQSITGLYESRKRLDD

SEQ ID NO: 236 - protein, 1327 aa, Listeria innocua; identical to SEQ ID NO: 235

SEQ ID NO: 237 - protein, 1101 aa, Listeria innocua
LKLYPGEKSTGMFAQFISLIVGSKGNFQKPFDLIEKSDIECAKDSYEEDLESLLALIGDEYAELFVAAKNAYSAVVLSSIITVAETETNAKLSASMIERFDTHEEDLGELKAFIKLHLPKHYEEIFSNTEKHGYAGYIDGTKQADFYKYMKTTLENIEGADYFIAKIEKENFLRKQRTFDNGAIPHQLHLEELEAILHQQAKYYPFLKENYDKIKSLVTFRIPYFVGPLANGQSEFAWLTRKADGEIRPWNIEEKVDFGKSAVDFIEKMTNKDTYLPKENVLPKHSLCYQKYLVYNELTKVRYINDQGKTSYFSGQEKEQIFNDLFKQKRKVKKKDLELFLRNMSHVESPTIEGLEDSFNSSYSTYHDLLKVGIKQEILDNPVNTEMLENIVKILTVFEDKRMIKEQLQQFSDVLDGVVLKKLERRHYTGWGRLSAKLLMGIRDKQSHLTILDYLMDDGLNRNLMQLINDSNLSFKSIIEKEQVTTADKDIQSIVADLAGSPAIKKGILQSLKIVDELVSVMGYPPQTIVVEMARENQTTGKGKNNSRPRYKSLEKAIKEFGSQILKEHPTDNQELKNNRLYLYYLQNGKDMYTGQDLDIHNLSNYDIDHIVPQSFITDNSIDNLVLTSSAGNREKGNDVPPLEIVQKRKVFWEKLYQGNLMSKRKFDYLTKAERGGLTEADKARFIHRQLVETRQITKNVANILHQRFNYGKDDHGNTMKQVRIVTLKSALVSQFRKQFQLYKVRGVNDYHHAHDAYLNGVVANTLLKVYPQLEPEFVYGDYHQFDWFKANKATAKKQFYTNIMLFFAQKDRIIDENGEILWDKKYLDTVKKVMSYRQMNIVKKTEIQKGEFSKATIKPKGNSSKLIPRKTNWDPMKYGGLDSPNMAYAVVIEYAKGKNKLVFEKKIIRVTIMERKAFEKDEKAFLEEQGYRQPKVLAKLPKYTLYECEEGRRRMLASANEAQKGNQQVLPNHLVTLLHHAANCEVSDGKSLDYIESNREMFAELLAHVSEFAKRYTLAEANLNKINQLFEQNKEGDIKAIAQSFVDLMAFNAMGAPASFKFFETTIERKRYNNLKELLNSTIIYQSITGLYESRKRLDD

SEQ ID NO: 238 - protein, 1327 aa, Listeria ivanovii
MRKPYTIGLDIGTNSVGWAVLTDQYNLVKRKMKVAGSAEKKQIKKNFWGVRLFDEGEVAAGRRMNRTTRRRIERRRNRIAYLQEIFAAEMAEVDANFFYRLEDSFYIESEKRHSRHPFFATIEEEVAYHEEYKTIYHLREKLVNSSDKADLRLVYLALAHIIKYRGNFLIEGMLDTKNTSVDEVFKQFIQTYNQIFASDIERLEENKEVAEILSEKLTRREKLDKILKLYTGEKSTGMFARFINLIIGSKGDFKKVFDLDEKAEIECAKDTYEEDLEALLAKIGDEYAEIFVAAKSTYNAVVLSNIITVTDTETKAKLSASMIERFDKHAKDLKRLKAFFKMQLPEKFNEVFNDIEKDGYAGYIDGTTQEKFYKYMKKMLANIDGADYFIDQIEEENFLRKQRTFDNGTIPHQLHLEELEAILHQQAKYYPFLRKDYEKIRSLVTFRIPYFIGPLANGQSDFAWLTRKADGEIRPWNIEEKVDFGKSAIDFIEKMTNKDTYLPKENVLPKHSLCYQKYMVYNELTKIRYIDDQGKTHHFSGQEKQQIFNGLFKQQRKVKKKDLERFLYTINHIESPTIEGVEDAFNSSFATYHDLQKGGVTQEILDNPLNADMLEEIVKILTVFEDKRMIKEQLQSFSDVLDGTILKKLERRHYTGWGRLSAKLLTGIRDKHSHLTILDYLMDDGLNRNLMQLINDSNLSFKSIIEKEQVSTADKGIQSIVAELAGSPAIKKGILQSLKIVDELVGIMGYPPQTIVVEMARENQTTGKGKNNSKPRFISLEKAIKEFGSQILKEHPTDNQCLKNDRLYLYYLQNGKDMYTGKELDIHNLSNYDIDHIIPQSFITDNSIDNRVLVSSTANREKGDNVPLLEVVRKRKAFWEKLYQAKLMSKRKFDYLTKAERGGLTEADKANFIQRQLVETRQITKNVANILYQRFNCKQDENGNEVEQVRIVTLKSTLVSQFRKQFQLYKVREVNDYHHAHDAYLNGVVANTLLKVYPQLEPEFVYGDYHQFDWFKANKATAKKQFYTNIMRFFAKENQIIDKNGEILWDNRYLDTIKKVLSYRQMNIVKKTEIQKGEFSNATVNPKGNSSKLISRKADWNPIKYGGFDGSNMAYSIVIEYEKRKKKTVIKKELIQINIMERVAFEKDQKAFLEEKGYYSPKVLTKIPKYTLYECENGRRRMLGSANEAQKGNQMVLPNHLMTLLYHAKNCEANDGESLAYIEMHREMFAELLAYISEFAKRYTLANDRLEKINMFFEQNKKGDIKVIAKSFDKLKVFNAFGAPRDFEFFETTIKRKRYYNIKELLNATIIYQSITGLYEARKRLED

SEQ ID NO: 239 - protein, 952 aa, Listeria ivanovii
MKKMLANIDGADYFIDQIEEENFLRKQRTFDNGTIPHQLHLEELEAILHQQAKYYPFLRKDYEKIRSLVTFRIPYFIGPLANGQSDFAWLTRKADGEIRPWNIEEKVDFGKSAIDFIEKMTNKDTYLPKENVLPKHSLCYQKYMVYNELTKIRYIDDQGKTHHFSGQEKQQIFNGLFKQQRKVKKKDLERFLYTINHIESPTIEGVEDAFNSSFATYHDLQKGGVTQEILDNPLNADMLEEIVKILTVFEDKRMIKEQLQSFSDVLDGTILKKLERRHYTGWGRLSAKLLTGIRDKHSHLTILDYLMDDGLNRNLMQLINDSNLSFKSIIEKEQVSTADKGIQSIVAELAGSPAIKKGILQSLKIVDELVGIMGYPPQTIVVEMARENQTTGKGKNNSKPRFISLEKAIKEFGSQILKEHPTDNQCLKNDRLYLYYLQNGKDMYTGKELDIHNLSNYDIDHIIPQSFITDNSIDNRVLVSSTANREKGDNVPLLEVVRKRKAFWEKLYQAKLMSKRKFDYLTKAERGGLTEADKANFIQRQLVETRQITKNVANILYQRFNCKQDENGNEVEQVRIVTLKSTLVSQFRKQFQLYKVREVNDYHHAHDAYLNGVVANTLLKVYPQLEPEFVYGDYHQFDWFKANKATAKKQFYTNIMRFFAKENQIIDKNGEILWDNRYLDTIKKVLSYRQMNIVKKTEIQKGEFSNATVNPKGNSSKLISRKADWNPIKYGGFDGSNMAYSIVIEYEKRKKKTVIKKELIQINIMERVAFEKDQKAFLEEKGYYSPKVLTKIPKYTLYECENGRRRMLGSANEAQKGNQMVLPNHLMTLLYHAKNCEANDGESLAYIEMHREMFAELLAYISEFAKRYTLANDRLEKINMFFEQNKKGDIKVIAKSFDKLKVFNAFGAPRDFEFFETTIKRKRYYNIKELLNATIIYQSITGLYEARKRLED

SEQ ID NO: 240 - protein, 1327 aa, Listeria monocytogenes
MKNPYTIGLDIGTNSVGWAVLTNQYDLVKRKMKVAGNSDKKQIKKNFWGVRLFDDGQTAVDRRMNRTARRRIERRRNRISYLQEIFAVEMANIDANFFCRLNDSFYVDSEKRNSRHPFFATIEEEVAYHDNYRTIYHLREKLVNSSEKADLRLVYLALAHIIKYRGNFLIEGALDTKNTSVDEVYKQFIETYNQVFMSNIEKVEENIEVANILAGKFTRREKFERILQLYPGEKSTGMFAQFISLIVGSKGNFQKVFDLIEKTDIECAKDSYEEDLETLLAIIGDEYAELFVAAKNTYNAVVLSSIITVTDTETNAKLSASMIERFDAHEKDLVELKAFIKLNLPKQYEEIFSNAAIDGYAGYIDGTKQVDFYKYLKTILENIEGSDYFIAKIEEENFLRKQRTFDNGAIPHQLHLEELEAIIHQQAKYYPFLKEDYDKIKSLVTFRIPYFVGPLANGQSEFAWLTRKADGEIRPWNIEEKVDFGKSAVDFIEKMTNKDTYLPKENVLPKHSLCYQKYMVYNELTKIRYIDDQGKTNYFSGREKQQVFNDLFKQKRKVKKKDLELFLRNINHIESPTIEGLEDSFNASYATYHDLLKVGMKQEILDNPLNTEMLEDIVKILTVFEDKPMIKEQLQQFSDVLDGGVLKKLERRHYTGWGRLSAKLLVGIREKQSHLTILDYLMDDGLNRNLMQLINDSNLSFKSIIEKEQVSTTDKDLQSIVAELAGSPAIKKGILQSLKIVDELVSIMGYPPQTIVVEMARENQTTGKGKNNSKPRYKSLEKAIKEFGSQILKEHPTDNQELKNNRLYLYYLQNGKDMYTGQELDIHNLSNYDIDHIVPQSFITDNSIDNLVLTSSAGNREKGGDVPPLEIVRKRKVFWEKLYQGNLMSKRKFDYLTKAERGGLTEADKARFIHRQLVETRQITKNVANILYQRFNKETDNHGNTMEQVRIVTLKSALVSQFRKQFQLYKVREVNGYHHAHDAYLNGVVANTLLKVYPQLEPEFVYGEYHQFDWFKANKATAKKQFYTNIMLFFAQKERIIDENGEILWDKKYLETIKKVLDYRQMNIVKKTEIQKGEFSKATIKPKGNSSKLIPRKENWDPMKYGGLDSPNMAYAVIIEHAKGKKKIVIEKKLIQINIMERKMFEKDEEAFLEEKGYRHPKVLTKLPKYTLYECEKGRRRMLASANEAQKGNQLVLSNHLVSLLYHAKNCEASDGKSLKYIEAHRETFSELLAQVSEFATRYTLADANLSKINNLFEQNKEGDIKAIAQSFVDLMAFNAMGAPASFKFFEATIDRKRYTNLKELLSSTIIYQSITGLYESRKRLDD

SEQ ID NO: 241 - protein, 1327 aa, Listeria monocytogenes
MKNPYTIGLDIGTNSVGWAVLTDQYDLVKRKMKVAGNSDKKQIKKNFWGVRLFDDGQTAVDRRMNRTARRRIERRRNRISYLQEIFAVEMANIDANFFCRLNDSFYVDSEKRNSRHPFFATIEEEVAYHKNYRTIYHLREELVNSSEKADLRLVYLALAHIIKYRGNFLIEGALDTKNTSVDEVYKQFIQTYNQVFMSNIEKVEENTEVASILAGKFTRREKFERILRLYPGEKSTGMFAQFISLIVGNKGNFQKVFNLVEKTDIECAKDSYEEDLEALLAIIGDEYAELFVAAKNTYNAVVLSSIITVTATETNAKLSASMIERFDAHEKELGELKAFIKLHLPKQYQEIFNNAEIDGYAGYIDGTKQVDFYKYLKTTLENVEGADYFITKIEEENFLRKQRTFDNGVIPHQLHLEELEAILHQQAKYYPFLREGYDKIKSLVTFRIPYFVGPLANGQSEFAWLTRKDDGEIRPWNIEEKVDFGKSAVDFIEKMTNKDTYLPKENVLPKHSLCYQKYMVYNELTKIRYIDDQGKTNYFSGREKQQIFNDLFKQKRKVKKKDLELFLRNINHIESPTIEGLEDSFNASYATYHDLLKVGLKQEILDNPLNTEILEDIVKILTVFEDKRMIKEQLEQFSDVLDGVVLKKLERRHYTGWGRLSAKLLVGIRDKQSHLTILDYLMDDGLNRNLMQLINDSNLSFKSIIEKEQVSTTDKDLQSIVADLAGSPAIKKGILQSLKIVDELVSIMGYPPQTIVVEMARENQTTGKGKNNSKPRYKSLEKAIKDFGSQILKEHPTDNQELKNNRLYLYYLQNGKDIYTGQELDIHNLSNYDIDHIVPQSFITDNSIDNLVLTSSAGNREKGGDVPPLEIVRKRKVFWEKLYQGNLMSKRKFDYLTKAERGGLTEADKARFIHRQLVETRQITKNVANILHQRFNKETDNHGNTMEQVRIVTLKSALVSQFRKQFQLYKVREVNDYHHAHDAYLNGVVANTLLKVYPQLEPEFVYGEYHQFDWFKANKATAKKQFYTNIMLFFAQKERIIDENGEILWDKKYLETIKKVLDYRQINIVKKTEIQKGEFSKATIKPKGNSSKLIPRKENWDPMKYGGLDSPNMAYAVIIEHAKGKKKIVIEKKLIQINIMERKMFEKDEEAFLEEKGYHQPKVLTKLPKYTLYECEKGRRRMLSSANEAQKGNQLVLSNHLVSLLYHAKNCEASDGKSLKYIEAHRETFSELLAQVSEFATKYTLADANLSKINNLFEQNKEGDIKAIAQSFVDLMAFNAMGAPASFKFFEATIDRKRYTNLKELLSSTIIYQSITGLYESRKRLDD

SEQ ID NO: 242 - protein, 1327 aa, Listeria monocytogenes
MKNPYTIGLDIGTNSVGWAVLTDQYDLVKRKMKVAGNSDKKQIKKNFWGVRLFDDGQTAVDRRMNRTARRRIERRRNRISYLQEIFAVEMANIDANFFCRLNDSFYVDSEKRNSRHPFFATIEEEVAYHKNYRTIYHLREELVNSSEKADLRLVYLALAHIIKYRGNFLIEGALDTKNTSVDEVYKQFIQTYNQVFMSNIEKVEENTEVASILAGKFTRREKFERILRLYPGEKSTGMFAQFISLIVGNKGNFQKVFNLVEKTDIECAKDSYEEDLEALLAIIGDEYAELFVAAKNTYNAVVLSSIITVTATETNAKLSASMIERFDAHEKELGELKAFIKLHLPKQYQEIFNNAEIDGYAGYIDGTKQVDFYKYLKTTLENVEGADYFITKIEEENFLRKQRTFDNGVIPHQLHLEELEAILHQQAKYYPFLREGYDKIKSLVTFRIPYFVGPLANGQSEFAWLTRKDDGEIRPWNIEEKVDFGKSAVDFIEKMTNKDTYLPKENVLPKHSLCYQKYMVYNELTKIRYIDDQGKTNYFSGREKQQIFNDLFKQKRKVKKKDLELFLRNINHIESPTIEGLEDSFNASYATYHDLLKVGLKQEILDNPLNTEILEDIVKILTVFEDKRMIKEQLEQFSDVLDGVVLKKLERRHYTGWGRLSAKLLVGIRDKQSHLTILDYLMDDGLNRNLMQLINDSNLSFKSIIEKEQVSTTDKDLQSIVADLAGSPAIKKGILQSLKIVDELVSIMGYPPQTIVVEMARENQTTGKGKNNSKPRYKSLEKAIKDFGSQILKEHPTDNQELKNNRLYLYYLQNGKDIYTGQELDIHNLSNYDIDHIVPQSFITDNSIDNLVLTSSAGNREKGGDVPPLEIVRKRKVFWEKLYQGNLMSKRKFDYLTKAERGGLTEADKARFIHRQLVETRQITKNVANILHQRFNKETDNHGNTMEQVRIVTLKSALVSQFRKQFQLYKVREVNDYHHAHDAYLNGVVANTLLKVYPQLEPEFVYGEYHQFDWFKANKATAKKQFYTNIMLFFAQKERIIDENGEILWDKKYLETIKKVLDYRQINIVKKTEIQKGEFSKATIKPKGNSSKLIPRKENWDPVKYGGLDSPNMAYAVIIEHAKGKKKIVIEKKLIQINIMERKMFEKDEEAFLEEKGYHQPKVLTKLPKYTLYECEKGRRRMLSSANEAQKGNQLVLSNHLVSLLYHAKNCEASDGKSLKYIEAHRETFSELLAQVSEFATKYTLADANLSKINNLFEQNKEGDIKAIAQSFVDLMAFNAMGAPASFKFFEATIDRKRYTNLKELLSSTIIYQSITGLYESRKRLDD

SEQ ID NO: 243 - protein, 1327 aa, Listeria monocytogenes
MKKPYTIGLDIGTNSVGWAVLTDQYDLVKRKMKISGDSEKKQIKKNFWGVRLFEKGETAAKRRMSRTARRRIERRRNRISYLQEIFAIQMNEVDDNFFNRLKESFYAESDKKYNRHPFFGTVEEEVAYYKDFPTIYHLRKELIDSQKKADLRLVYLALAHIIKYRGHFLIEGALDTKNTSIDEMFKQFLQIYNQVFANDIEKTEKNQEVAQILAEKFTRKDKLDKILSLYPGEKTTGVFAQFVNIIVGSTGKFKKHFNLHEKKDINCAEDTYDTDLESLLAIIGDEFAEVFVAAKNAYNAVVLSNIITVTDSTTRAKLSASLIERFENHKEDLKKMKRFVRTYLPEKYDEIFDDTEKHGYAGYISGTKQADFYKYMKATLEKIEGADYFIAKIEEENFLRKQRTFDNGVIPHQLHLEELEAILHQQAKYYPFLREDYEKIKSLVTFRIPYFVGPLAKGQSEFAWLTRKADGEIRPWNIEEKVDFGKSAVDFIEKMTNKDTYLPKENVLPKHSLCYQKYMVYNELTKVRYIDDQGKTNYFSGQEKQQIFNDLFKQKRKVKKKDLELFLRNINQIESPTIEGLEDSFNASYATYHDLLKVGMKQEILDNPLNTEMLEDIVKILTVFEDKRMIKEQLQQFSDVLDGTVLKKLERRHYTGWGRLSAKLLVGIRDKQSHLTILDYLMDDGLNRNLMQLINDSNLSFKSIIEKEQVSTTDKDLQSIVAELAGSPAIKKGILQSLKIVDELVSVMGYPPQTIVVEMARENQTTNKGKNNSKPRYKSLEKAIKEFGSQILKEHPTDNQELKNNRLYLYYLQNGKDMYTGQELDIHNLSNYDIDHIVPQSFITDNSVDNLVLTSSAGNREKGDNVPPLEIVQKRKIFWEKLYQGNLMSKRKFDYLTKAERGGLTEADKARFIHRQLVETRQITKNVANILHQRFNYKTDGNKDTMETVRIVTLKSALVSQFRKQFQFYKVREVNDYHHAHDAYLNGVVANTLLKVYPQLEPEFVYGEYHQFGWFKANKATAKKQFYTNIMLFFAQKDRIIDENGEILWDKRYLETVKKVLGYRQMNIVKKTEIQKGEFSNVTPNPKGKSNKLIPRKKDWDPIKYGGFDGSKMAYAIIIEYEKQKRKVRIEKKLIQINIMEREAFEKDEKTFLEEKGYHQPKVLIKVPKYTLYECKNGRRRMLGSANEAHKGNQMLLPNHLMALLYHAEKYEAIDGESLAYIEVHRALFDELLAYISEFARKYTLSNDRLDEINMLYERNKDGDVKSIAESFVSLKKFNAFGVHQDFSFFGTKIERKRDRKLNELLNSTIIYQSITGLYESRKRLDN

SEQ ID NO: 244 - protein, 1327 aa, Listeria monocytogenes
MKNPYTIGLDIGTNSVGWAVLTDQYDLVKRKMKVAGNSDKKQIKKNFWGVRLFDEGETAADRRMNRTARRRIERRRNRISYLQEIFALEMANIDANFFCRLNDSFYVDSEKRNSRHPFFATIEEEVAYHKNYRTIYHLREELVNSSEKADLRLVYLALAHIIKYRGNFLIEGALDTKNTSVDGVYKQFIQTYNQVFISNIEKMEENTTVADILAGKFTRKEKLERILQLYPGEKSTGMFAQFISLIVGSKGNFQKVFDLVEKTDIECAKDSYEEDLEALLAIIGDEYAELFVAAKNTYNAVVLSSIITVTDTETNAKLSASMIERFDAHEKDLSELKAFIKLHLPKQYEEIFSNVAIDGYAGYIDGTKQVDFYKYLKTLLENIEGADYFIAKIEEENFLRKQRTFDNGAIPHQLHLEELEAILHQQAKYYPFLKEAYDKIKSLVTFRIPYFVGPLANGQSDFAWLTRKADGEIRPWNIEEKVDFGKSAVDFIEKMTNKDTYLPKENVLPKHSLYYQKYMVYNELTKVRYIDDQGKTNYFSGQEKQQIFNDYFKQKRKVSKKDLEQFLRNMSHIESPTIEGLEDSFNSSYATYHDLLKVGIKQEVLENPLNTEMLEDIVKILTVFEDKRMIKEQLQQFSDVLDGAVLKKLERRHYTGWGRLSAKLLVGIRDKQSHLTILDYLMDDGLNRNLMQLINDSNLSFKSIIEKEQVSTTDKDLQSIVADLAGSPAIKKGILQSLKIVDELVSIMGYPPQTIVVEMARENQTTVKGKNNSRPRYKSLEKAIKEFGSQILKEHPTDNQELRNNRLYLYYLQNGKDMYTGQELDIHNLSNYDIDHIVPQSFITDNSIDNLVLTSSAGNREKGDDVPPLEIVRKRKVFWEKLFQGNLMSKRKFDYLTKAERGGLTEADKATFIHRQLVETRQITKNVANILHQRFNNETDNHGNNMEQVRIVMLKSALVSQFRKQFQLYKVREVNDYHHAHDAYLNGVVANTLLKVYPQLEPEFVYGEYHQFDWFKANKATAKKQFYTNIMLFFAQKERIIDENGEILWDKKYLETIKKVLDYRQMNIVKKTEIQKGEFSKATIKPKGNSSKLIPRKENWDPMKYGGLDSPNMAYAVIIEHAKGKKKVVFEKKIIRITIMERKAFEKDEKSFLEKQGYRQPKVLTKLPKYTLYECENGRRRMLASANEAQKGNQQVLKGQLITLLHHAKNCEASDGKSLDYIESNREMFGELLAHVSEFAKRYTLADANLSKINQLFEQNKDNDIKVIAQSFVNLMAFNAMGAPASFKFFEATIERKRYTNLKELLSATIIYQSITGLYEARKRLDG

SEQ ID NO: 245 - protein, 1327 aa, Listeria monocytogenes
MKNPYTIGLDIGTNSVGWAVLTNQYDLVKRKMKVAGNSDKKQIKKNFWGVRLFDDGQTAVDRRMNRTARRRIERRRNRISYLQEIFAVEMANIDANFFCRLNDSFYVDSEKRNSRHPFFATIEEEVAYHKNYRTIYHLREELVNSSEKADLRLVYLALAHIIKYRGNFLIEGALDTKNTSVDGVYEQFIQTYNQVFMSNIEKVEENIEVANILAGKFTRREKFERILQLYPGEKSTGMFAQFISLIVGSKGNFQKVFDLIEKTDIECAKDSYEEDLEALLAIIGDEYAELFVAAKNTYNAVVLSSIITVTATETNAKLSASMIERFDAHEKDLGELKAFIKLHLPKQYQEIFNNAAIDGYAGYIDGTKQVDFYKYLKTILENIEGADYFIAKIEEENFLRKQRTFDNGAIPHQLHLEELEAIIHQQAKYYPFLREDYEKIKSLVTFRIPYFVGPLAKGQSEFAWLTRKADGEIRPWNIEEKVDFGKSAVDFIEKMTNKDTYLPKENVLPKHSLCYQKYMVYNELTKVRYIDDQGKTNYFSGQEKQQIFNDLFKQKRKVKKKDLELFLRNINHIESPTIEGLEDSFNASYATYHDLLKVGMKQEILDNPLNTEMLEDIVKILTVFEDKPMIKEQLQQFSDVLDGGVLKKLERRHYTGWGRLSAKLLVGIREKQSHLTILDYLMDDGLNRNLMQLINDSNLSFKSIIEKEQVSTTDKDLQSIVADLAGSPAIKKGILQSLKIVDELVSIMGYPPQTIVVEMARENQTTGKGKNNSKPRYKSLEKAIKEFGSKILKEHPTDNQELKNNRLYLYYLQNGKDMYTGQELDIHNLSNYDIDHIVPQSFITDNSIDNLVLTSSAGNREKGGDVPPLEIVRKRKVFWEKLYQGNLMSKRKFDYLTKAERGGLTDADKARFIHRQLVETRQITKNVANILHQRFNNETDNHGNTMEQVRIVTLKSALVSQFRKQFQLYKVREVNDYHHAHDAYLNGVVANTLLKVYPQLEPEFVYGEYHQFDWFKANKATAKKQFYTNIMLFFGQKERIIDENGEILWDKKYLETIKKVLDYRQMNIVKKTEIQKGEFSKATIKPKGNSSKLIPRKENWDPMKYGGLDSPNMAYAVIIEHAKGKKKLIFEKKIIRITIMERKMFEKDEEAFLEEKGYRHPKVLTKLPKYTLYECEKGRRRMLASANEAQKGNQLVLSNHLVSLLYHAKNCEASDGKSLKYIEAHRETFSELLAQVSEFATRYTLADANLSKINNLFEQNKEGDIQAIAQSFVDLMAFNAMGAPASFKFFEATIDRKRYTNLKELLSSTIIYQSITGLYESRKRLDD

SEQ ID NO: 246 - protein, 1327 aa, Listeria monocytogenes
MKNPYTIGLDIGTNSVGWAVLTNQYDLVKRKMKVAGNSDKKQIKKNFWGVRLFDDGQTAVDRRMNRTARRRIERRRNRISYLQEIFAVEMANIDANFFCRLNDSFYVDSEKRNSRHPFFATIEEEVAYHKNYRTIYHLREELVNSSEKADLRLVYLALAHIIKYRGNFLIEGALDTKNTSVDGVYEQFILTYNQVFMSNIEKVEENIEVANILAGKFTRREKFERILQLYPGEKSTGMFAQFISLIVGSKGNFQKVFDLIEKTDIECAKDSYEEDLETLLAIIGDEYAELFVAAKNTYNAVVLSSIITVTDTETNAKLSASMIERFDAHEKDLVELKAFIKLNLPKQYEEIFSNAAIDGYAGYIDGTKQVDFYKYLKTTLENVEGADYFITKIEEENFLRKQRTFDNGVIPHQLHLEELEAILHQQAKYYPFLREDYEKIKSLVTFRIPYFVGPLAKGQSEFAWLTRKADGEIRPWNIEEKVDFGKSAVDFIEKMTNKDTYLPKENVLPKHSLCYQKYMVYNELTKIRYIDDQGKTNYFSGQEKQQIFNDLFKQKRKVKKKDLELFLRNINHVESPTIEGLEDSFNASYATYHDLMKVGIKQEILDNPLNTEMLEDIVKILTVFEDKRMIKEQLQQFSDVLDGTVLKKLERRHYTGWGRLSAKLLVGIRDKQSHLTILDYLMDDGLNRNLMQLINDSNLSFKSIIEKEQVSTADKDLQSIVADLAGSPAIKKGILQSLKVVEELVSVMGYPPQTIVVEMARENQTTNKGKNNSKPRYKSLEKAIKEFGSQILKEHPTDNQELKNNRLYLYYLQNGKDMYTGQELDIHNLSNYDIDHIVPQSFITDNSIDNLVLTSSAGNREKGDNVPPLEIVQKRKIFWEKLYQGNLMSKRKFDYLTKAERGGLTEADKARFIHRQLVETRQITKNVANILHQRFNYKTDDNEDTMEPVRIVTLKSALVSQFRKQFQLYKVREVNDYHHAHDAYLNGVVANTLLKVYPQLEPEFVYGEYHQFDWFKANKATAKKQFYTNIMLFFAQKERIIDENGEILWDKKYLETIKKVLNYRQMNIVKKTEIQKGEFSNQNPKPRGDSSKLIPKKTNLNPIKYGGFEGSNMAYAIIIEHEKRKKKVTIEKKLIQINIMERKAFEKDEKVFLEGKGYHQPKVLTKLPKYALYECENGRRRMLGSANEVHKGNQMLLPNHLMTLLYHAEKREAIDGESLAYIEAHKAVFGELLAHISEFARKYTLANDKLDEINMLYERNKDGDVKSIAESFVSLKKFNAFGVHKDFNFFGTTIKRKRDRKLKELLNSTIIYQSITGLYESRKRLDS

SEQ ID NO: 247 - protein, 1327 aa, Listeria monocytogenes
MKNPYTIGLDIGTNSVGWAVLTDQYDLVKRKMKVAGNSDKKQIKKNFWGVRLFDDGQTAVDRRMNRTARRRIERRRNRISYLQEIFAVEMANIDANFFCRLNDSFYVDSEKRNSRHPFFATIEEEVAYHKNYRTIYHLREELVNSSEKADLRLVYLALAHIIKYRGNFLIEGALDTKNTSVDGVYEQFIQTYNQVFMSNIEKVEENIEVANILAGKFTRREKFERILQLYPGEKSTGMFAQFISLIVGSKGNFQKVFDLIEKTDIECAKDSYEEDLETLLAIIGDEYAELFVAAKNTYNAVVLSSIITVNDTETNAKLSASMIERFDAHEKDLVELKAFIKLNLPKQYEEIFSNAAIDGYAGYIDGTKQVDFYKYLKTILENIEGSDYFIAKIEEENFLRKQRTFDNGAIPHQLHLEELEAIIHQQAKYYTFLKEDYDKIKSLVTFRIPYFVGPLANGQSEFAWLTRKADGEIRPWNIEEKVDFGKSAVDFIEKMTNKDTYLPKENVLPKHSLCYQKYMVYNELTKVRYIDDQGKTNYFSGQEKQQIFNDLFKQKRKVKKKDLELFLRNINQIESPTIEGLEDSFNASYATYHDLLKVGMKQEILDNPLNTEMLEDIVKILTVFEDKRMIKEQLQQFSDVLDGVVLKKLERRHYTGWGRLSAKLLVGIRDKQSHLTILEYLMDDGLNRNLMQLINDSNLSFKSIIEKEQVSTTDKDLQSIVAELAGSPAIKKGILQSLKIVDELVSIMGYPPQTIVVEMARENQTTGKGKNNSKPRYKSLEKAIKEFGSQILKEHPTDNQELKNNRLYLYYLQNGKDMYTGQELDIHNLSNYDIDHIVPQSFITDNSIDNLVLTSSAGNREKGGDVPPLEIVRKRKVFWEKLYQGNLMSKRKFDYLTKAERGGLTEADKARFIHRQLVETRQITKNVANILHQRFNKETDNHGNTMEQVRIVTLKSALVSQFRKQFQLYKVREVNDYHHAHDAYLNGVVANTLLKVYPQLEPEFVYGEYHQFDWFKANKATAKKQFYTNIMLFFAQKERIIDENGEILWDKKYLETIKKVLDYRQMNIVKKTEIQKGEFSKATIKPKGNSSKLIPRKENWDPMKYGGLDSPNMAYAVIIEHAKGKKRIVIEKKLIQINIMERKMFEKDEEAFLEEKGYRHPKVLTKLPKYTLYECEKGRRRMLASANEAQKGNQLVLSNHLVSLLYHAKNCEASDGKSLKYIEAHRETFSELLAQVSEFATRYTLADANLSKINNLFEQNKEGDIKAIAQSFVDLMAFNAMGAPASFKFFEATIDRKRYTNLKELLSSTIIYQSITGLYESRKRLDD

SEQ ID NO: 248 - protein, 1327 aa, Listeria monocytogenes
MKKPYTIGLDIGTNSVGWAVLTDQYDLVKRKMKISGDSEKKQIKKNFWGVRLFEKGETAAKRRMSRTARRRIERRRNRISYLQEIFAIQMNEVDDNFFNRLKESFYAESDKKYNRHPFFGTVEEEVAYYKDFPTIYHLRKELIDSQKKADLRLVYLALAHIIKYRGHFLIEGALDTKNTSIDEMFKQFLQIYNQVFANDIEKTEKNQEVAQILAEKFTRKDKLDKILSLYPGEKTTGVFAQFVNIIVGSTGKFKKHFNLHEKKDINCAEDTYDTDLESLLAIIGDEFAEVFVAAKNAYNAVVLSNIITVTDSTTRAKLSASLIERFENHKEDLKKMKRFVRTYLPEKYDEIFDDTEKHGYAGYISGTKQADFYKYMKATLEKIEGADYFIAKIEEENFLRKQRTFDNGVIPHQLHLEELEAILHQQAKYYPFLREDYEKIKSLVTFRIPYFVGPLAKGQSEFAWLTRKADGEIRPWNIEEKVDFGKSAVDFIEKMTNKDTYLPKENVLPKHSLCYQKYMVYNELTKVRYIDDQGKTNYFSGQEKQQIFNDLFKQKRKVKKKDLELFLRNINQIESPTIEGLEDSFNASYATYHDLLKVGMKQEILDNPLNTEMLEDIVKILTVFEDKRMIKEQLQQFSDVLDGTVLKKLERRHYTGWGRLSAKLLVGIRDKQSHLTILDYLMDDGLNRNLMQLINDSNLSFKSIIEKEQVSTADKDLQSIVADLAGSPAIKKGILQSLKIVDELVSVMGYPPQTIVVEMARENQTTNKGKNNSKPRYKSLEKAIKEFGSQILKEHPTDNQELKNNRLYLYYLQNGKDMYTGQELDIHNLSNYDIDHIVPQSFITDNSVDNLVLTSSAGNREKGDNVPPLEIVQKRKIFWEKLYQGNLMSKRKFDYLTKAERGGLTEADKARFIHRQLVETRQITKNVANILHQRFNYKTDGNKDTMETVRIVTLKSALVSQFRKQFQFYKVREVNDYHHAHDAYLNGVVANTLLKVYPQLEPEFVYGEYHQFDWFKANKATAKKQFYTNIMLFFAQKDRIIDENGEILWDKRYLETVKKVLGYRQMNIVKKTEIQKGEFSNVTPNPKGKSNKLIPRKKDWDPIKYGGFDGSKMAYAIIIEYEKQKRKVRIEKKLIQINIMEREAFEKDEKTFLEEKGYHQPKVLIKVPKYTLYECENGRRRMLGSANEAHKGNQMLLPNHLMALLYHAEKYEAIDGESLAYIEVHRALFDELLAYISEFARKYTLSNDRLDEINMLYERNKDGDVKSIAESFVSLKKFNAFGVHQDFSFFGTKIERKRDRKLNELLNSTIIYQSITGLYESRKRLDN

SEQ ID NO: 249 - protein, 1327 aa, Listeria monocytogenes
MKNPYTIGLDIGTNSVGWAVLTNQYDLVKRKMKVAGNSDKKQIKKNFWGVRLFDDGQTAVDRRMNRTARRRIERRRNRISYLQEIFAVEMANIDANFFCRLNDSFYVDSEKRNSRHPFFATIEEEVAYHKNYRTIYHLREELVNSSEKADLRLVYLALAHIIKYRGNFLIEGALDTKNTSVDGVYEQFIQTYNQVFMSNIEKVEENIEVANILARKFTRREKFERILQLYPGEKSTGMFAQFISLIVGSKGNFQKVFDLIEKTDIECAKDSYEEDLETLLAIIGDEYAELFVAAKNTYNAVVLSSIITVTDTETNAKLSASMIERFDAHEKDLVELKAFIKLNLPKQYEEIFSNAAIDGYAGYIDGTKQVDFYKYLKTILENIEGADYFIAKIEEENFLRKQRTFDNGAIPHQLHLEELEAIIHQQAKYYPFLREDYEKIKSLVTFRIPYFVGPLAKGQSEFAWLTRKADGEIRPWNIEEKVDFGKSAVDFIEKMTNKDTYLPKENVLPKHSLCYQKYMVYNELTKIRYIDDQGKTNYFSGQEKQQIFNDLFKQKRKVKKKDLELFLRNINHVESPTIEGLEDSFNASYATYHDLMKVGIKQEILDNPLNTEMLEDIVKILTVFEDKRMIKEQLQQFSDVLDGTVLKKLERRHYTGWGRLSAKLLVGIRDKQSHLTILDYLMDDGLNRNLMQLINDSNLSFKSIIEKEQVSTADKDLQSIVADLAGSPAIKKGILQSLKVVEELVSVMGYPPQTIVVEMARENQTTNKGKNNSKPRYKSLEKAIKEFGSQILKEHPTDNQELKNNRLYLYYLQNGKDMYTGQELDIHNLSNYDIDHIVPQSFITDNSIDNLVLTSSAGNREKGDNVPPLEIVQKRKIFWEKLYQGNLMSKRKFDYLTKAERGGLTEADKARFIHRQLVETRQITKNVANILHQRFNYKTDDNEDTMEPVRIVTLKSALVSQFRKQFQLYKVREVNDYHHAHDAYLNGVVANTLLKVYPQLEPEFVYGEYHQFDWFKANKATAKKQFYTNIMLFFAQKERIIDENGEILWDKKYLETIKKVLNYRQMNIVKKTEIQKGEFSNQNPKPRGDSSKLIPKKTNLNPIKYGGFEGSNMAYAIIIEHEKRKKKVTIEKKLIQINIMERKAFEKDEKVFLEGKGYHQPKVLTKLPKYALYECENGRRRMLGSANEVHKGNQMLLPNHLMTLLYHAEKREAIDGESLAYIEAHKAVFGELLAHISEFARKYTLANDKLDEINMLYERNKDGDVKSIAESFVSLKKFNAFGVHKDFNFFGTTIKRKRDRKLKELLNSTIIYQSITGLYESRKRLDS

SEQ ID NO: 250 - protein, 1327 aa, Listeria monocytogenes; identical to SEQ ID NO: 245

SEQ ID NO: 251 - protein, 1327 aa, Listeria monocytogenes; identical to SEQ ID NO: 249

SEQ ID NO: 252 - protein, 781 aa, Listeria monocytogenes
  VARIANT (721)..(721): Xaa can be any naturally occurring amino acid
IFNDLFKQKRKVKKKDLELFLRNINQIESPTIEGLEDSFNASYATYHDLLKVGMKQEILDNPLNTEMLEDIVKILTVFEDKRMIKEQLQQFSDVLDGVVLKKLERRHYTGWGRLSAKLLVGIRDKQSHLTILEYLMDDGLNRNLMQLINDSNLSFKSIIEKEQVSTTDKDLQSIVADLAGSPAIKKGILQSLKIVDELVSIMGYPPQTIVVEMARENQTTVKGKNNSRPRYKSLEKAIKEFGSQILKEHPTDNQELKNNRLYLYYLQNGKDIYTGQELDIHNLSNYDIDHIVPQSFITDNSIDNLVLTSSAGNREKGDDVPPLEIVRKRKVFWEKLYQGNLMSKRKFDYLTKAERGGLTEADKARFIHRQLVETRQITKNVANILHQRFNNETDNHGNTMEQVRIVTLKSALVSQFRKQFQLYKVREVNDYHHAHDAYLNGVVANTLLKVYPQLEPEFVYGEYHQFDWFKANKATAKKQFYTNIMLFFAQKERIIDENGEILWDKKYLETIKKVLDYRQMNIVKKTEIQKGEFSKATIKPKGNSSKLIPRKENWDPMKYGGLDSPNMAYAVIIEHAKGKKKIVIEKKLIQINIMERKMFEKDEEAFLEEKGYRHPKVLTKLPKYTLYECEKGRRRMLASANEAQKGNQLVLSNHLVSLLYHAKNCEASDGKSLKYTEAHRETFSELLAQVSEFATRYTLADANLSKINNLFEQNKEGDIKXIAQSFVDLMVFNAMGAPASFKFFEATIDRKRYTNLKELLSSTIIYQSITGLYESRKRLDD

SEQ ID NO: 253 - protein, 1327 aa, Listeria seeligeri
MKKPYTIGLDIGTNSVGWAALTDQYDLVKRKMKVAGNSEKKQIKKNLWGVRLVDEGKTAAHRRVNRTTRRRIERRRNRISYLQEIFTAEMFEVDANFFYRLEDSFYIESEKRQSRHPFFATIEEEVAYHENYRTIYHLREKLVNSSDKADLRLVYLALAHIIKYRGNFLIEGKLDTKNTSVDEVFKQFIKTYNQVFASDIERIEENNEVAKIFSEKLTKREKLDKILNLYPNEKSTDLFAQFISLIIGSKGNFKKFFNLTEKTDIECAKDSYEEDLEVLLARVGDEYAEIFVAAKNAYNAVVLSSIITVSNTETKAKLSASMIERFDKHDKDLKRMKAFFKVRLPENFNEVFNDVEKDGYAGYIEGTKQEAFYKYMKKMLEHVEGADYFINQIEEENFLRKQRTFDNGAIPHQLHLEELEAILHQQAKYYPFLKVDYEKIKSLVTFRIPYFVGPLANGQSEFSWLTRKADGEIRPWNIEEKVDFGKSAIDFIEKMTNKDTYLPKENVLPKHSMCYQKYMVYNELTKIRYTDDQGKTHYFSGQEKQQIFNDLFKQKRKVKKKDLELFLYNMNHVESPTVEGVEDAFNSSFTTYHDLQKVGVPQEILDDPLNTEMLEEIIKILTVFEDKRMINERLQEFSNVLDEAVLKKLERRHYTGWGRLSAKLLIGIRDKESHLTILDYLMDDKHNRNLMQLINDSNLSFKSIIEKEQVSTADKDIQSIVADLAGSPAIKKGILQSLKIVDELVGIMGYPPQTIVVEMARENQTTGKGKNNSKPRFTSLEKAIKELGSQILKEHPTDNQGLKNDRLYLYYLQNGKDMYTGQELDIHNLSNYDIDHVVPQSFITDNSIDNRVLASSAANREKGDNVPSLEVVRKRKVYWEKLYQAKLMSKRKFDYLTKAERGGLTEADKARFIHRQLVETRQITKNVANILHQRFNCKKDESGNVIEQVRIVTLKAALVSQFRKQFQLYKVREVNDYHHAHDAYLNCVVANTLLKVYPQLEPEFVYGDYHQFDWFKANKATAKKQFYTNIMLFFAKKDRIIDENGEILWDKKYLDTIKKVLNYRQMNIVKKTEIQKGEFSNATANPKGNSSKLIPRKADWDPIKYGGFDGSNMAYAIVIEHEKRKKKTVIKKELIQINIMERTAFEKDQKEFLEGKGYRNPKVITKIPKYTLYECENGRRRMLGSANEAQKGNQMVLPNHLMTLLYHAKNCEASDGKSLAYIESHREMFAELLDSISEFASRYTLADANLEKINTIFEQNKSGDVKVIAQSFVNLLEFNAMGAPASFKYFETNIERKRYNNLKELLNATIIYQSITGLYEARKRLDD

SEQ ID NO: 254 - protein, 1359 aa, Artificial Sequence; identical to SEQ ID NO: 228
  Synthetic Polypeptide

SEQ ID NO: 255 - protein, 1290 aa, Roseburia hominis
IVDYCIGLDLGTGSVGWAVVDMNHRLMKRNGKHLWGSRLFSNAETAATRRSSRSIRRRYNKRRERIRLLRAILQDMVLEKDPTFFIRLEHTSFLDEEDKAKYLGDNYNLFIDEDFNDYTYYHKYPTIYHLRKALCESTEKADPRLIYLALHHIVKYRGNFLYEGQKFNMDASNIEDKLSDVFTQFADFNNIPYEDDKKNLEILEILKKPLSKKAKVDEVMALISPEKEFKSAYKELVTGIAGNKMNVTKMILCESIKQGDSEIKLKFSDSNYDDQFSEVENDLGEYVEFIDSLHNIYSWVELQTIMGATHTDNASISEAMVSRYNKHHEDLQLLKKCIKDNVPKKYFDMFRNDSEKVKGYYNYINRKAPVDEFYKFVKKCIEKVDTPEAKQILHDIELENFLLKQNSRTNGSVPYQMQLDEMIKIIDNQAKYYPVLKEKREQLLSILTFRIPYYFGPLETSEHAWIKRLEGKENQRILPWNYQDTVDVDATAEGFIKRMRSYCTYFPDEEVLPKNSLIVSKYEVYNELNKIRVDDKLLEVDVKNDIYNELFMKNKTVTEKKLKNWLVNNQCCRKDAEIKGFQKENQFSTSLTPWIDFTNIFGKIDQSNFDLIEKIIYDLTVFEDKKIMKRRLKKKYALPDDKIKQILKLKYKDWSRLSKKLLDGIVADSVTVLDVLESRLNLMEIINDKELGYAQMIEEASSCPKDGKFTYEEVAKLAGSPALKRGIWQSLQIVEEITKVMKCRPKYIYIEFERSEEKERTESKIKKLENVYKDEQTSVLEELKGFDNTKKISSDSLFLYFTQLGKCMYSGKKLDIDSLDKYQIDHIVPQSLVKDDSFDNRVLVLPSENQRKLDDLVVPFDIRDKMYRFWKLLFDHELISPKKFYSLIKTEYTERDEERFINRQLVETRQITKNVTQIIEDHYSTTKVAAIRANLSHEFRVKNHIYKNRDINDYHHAHDAYIVALIGGFMRDRYPNMHDSKAVYSEYMKMFRNKNDQKGFVINSMNYPYEVDGKLIWNPDLINEIKKCFYYKDCYCTTKLDQKSGQMFNTVLPNDAHSAKGAVIPVNKNRKDVNKYGGFSGLQYVIAAIEGTKKKGKKLVKVRKLSGIPLYLKQADIKEQIEYVEKEEKLSDVKIIKNNIPLNQLIEIDGRQYLLTSECVNAMQLVLNEEQCKLIADIYNAIYKQDFDGLDNMLMIQLYLQLIDKLKTLYPIYMGIVEKFEKFVSISKEEKANVIQMLIIMHKGPQNGNIIYDDFNVGKRIGRLNGRTFYLNIEFISQSPTGIYTKKYKL

SEQ ID NO: 256 - protein, 1292 aa, Sharpea azabuensis
KDIRYSIGLDIGTNSVGWAVMDEHYELLKKGNHHMWGSRLFDAAEPAATRRASRSIRRRYNKRRERIRLLRDLLGDMVMEVDPTFFIRLLNVSFLDEEDKQKNLGDNYNLFIEKDFNDKTYYDKYPTIYHLRKELCENKEKADPRLIYLALHHIVKYRGNFLYEGQSFTMDNSDIEERLNSAIEKFMSINEFDNRIVSDINSMIAVLSKIYQRSKKADDLLKIMNPTKEEKAAYKEFTKALVGLKFNISKMILAQEVKKGDTDIVLEFSNANYDSTIDELQSELGEYIEFIEMLHNIYSWVELQAILGATHTDNPSISAAMVERYEEHKKDLRVLKKVIREELPDKYNEVFRKDNRKLHNYLGYIKYDTPVEEFYKYIKGLLAKVDTDEAREILERIDLEKFMLKQNSRTNGSIPYQMQKDEMIQIIDNQSVYYPQLKENRDKLISILEFRIPYYFGPLAHSEFAWIKKFEDKQKERILPWNYDQIVDIDATAEGFIERMKNTGTYFPDEPVMAKNSLTVSKFEVLNELNKIRINGKLIAVETKKELLSDLFMKNKTITDKKLKDWLVTHQYYDINEELKIEGYQKDLQFSTSLAPWIDFTKIFGEINASNYQLIEKIIYDISIFEDKKILKRRLKKVYQLDDLLVDKILKLNYTGWSRLSEKLLTGMTADKATVLFVLESNKNLMEIINDEKLGYKQIIEESNMQDIEGPFKYDEVKKLAGSPAIKRGIWQALLVVREITKFMKHEPSHIYIEFAREEQKVRKESKIAKLQKIYENLQTQVYESLKKEDAKKRMETDALYLYYLQMGKSMYSGKPLDIDKLSTYQIDHILPQSLIKDDSFDNRVLVLPEENQWKLDSETVPFEIRNKMIGFWQMLHENGLMSNKKFFSLIRTDFSDKDKERFINRQLVETRQIIKNVAVIINDHYTNTNIVTVRAELSHQFRERYKIYKNRDINDFHHAHDAYIACIVGQFMHQNFEHLDAKIIYGQYKKNYKKNYGFILNSMNHLQSDIDTGEVMWDPAKIGKIKSCFYYKDVYVTKKLEQNSGTLFNTVLPNDAHSEKGATVPLNKYRADVHKYGGFGNVQSIIVAIEGKKKKGKKLIDVRKLTSIPLHLKNAPVEEQLSYIASPEHEDLIDVRIVKEILKNQLIEIDGGLYYVTSEYVTARQLSLNEQSCKLISEIYAAMLKKRYEYLDEEEIFDLYLQLLQKMDTLYPAYKGIAKRFFDFKNIDVVEKCDVIQILIIMHAGPMNGNIMYDDFKFTNRIGRFTHKNIDLKTTFISTSVTGLFSKKYKL

SEQ ID NO: 257 - protein, 1359 aa, Artificial Sequence; identical to SEQ ID NO: 228
  Synthetic Polypeptide

SEQ ID NO: 258 - protein, 1359 aa, Artificial Sequence
  Synthetic Polypeptide
MDKKYSIGLAIGTNSVGWAVITDEYKVPSKKFKVLGNTDRHSIKKNLIGALLFDSGETAEATRLKRTARRRYTRRKNRICYLQEIFSNEMAKVDDSFFHRLEESFLVEEDKKHERHPIFGNIVDEVAYHEKYPTIYHLRKKLVDSTDKADLRLIYLALAHMIKFRGHFLIEGDLNPDNSDVDKLFIQLVQTYNQLFEENINASGVDAKAILSARLSKSRRLENLIAQLPGEKKNGLFGNLIALSLGLTPNFKSNFDLAEDAKLQLSKDTYDDDLDNLLAQIGDQYADLFLAAKNLSDAILLSDILRVNTEITKAPLSASMIKRYDEHHQDLTLLKALVRQQLPEKYKEIFFDQSKNGYAGYIDGGASQEEFYKFIKPILEKMDGTEELLVKLNREDLLRKQRTFDNGSIPHQIHLGELHAILRRQEDFYPFLKDNREKIEKILTFRIPYYVGPLARGNSRFAWMTRKSEETITPWNFEEVVDKGASAQSFIERMTNFDKNLPNEKVLPKHSLLYEYFTVYNELTKVKYVTEGMRKPAFLSGEQKKAIVDLLFKTNRKVTVKQLKEDYFKKIECFDSVEISGVEDRFNASLGTYHDLLKIIKDKDFLDNEENEDILEDIVLTLTLFEDREMIEERLKTYAHLFDDKVMKQLKRRRYTGWGRLSRKLINGIRDKQSGKTILDFLKDGFANRNFMQLIHDDSLTFKEDIQKAQVSGQGDSLHEHIANLAGSPAIKKGILQTVKVVDELVKVMGRHKPENIVIEMARENQTTQKGQKNSRERMKRIEEGIKELGSQILKEHPVENTQLQNEKLYLYYLQNGRDMYVDQELDINRLSDYDVDAIVPQSFLKDDSIDNKVLTRSDKNRGKSDNVPSEEVVKKMKNYWRQLLNAKLITQRKFDNLTKAERGGLSELDKAGFIKRQLVETRQITKHVAQILDSRMNTKYDENDKLIREVKVITLKSKLVSDFRKDFQFYKVREINNYHHAHDAYLNAVVGTALIKKYPKLESEFVYGDYKVYDVSEQEIGKATAKYFFYSNIMNFFKTEITLANGEIRKRPLIETNGETGEIVWDKGRDFATVRKVLSMPQVNIVKKTEVQTGGFSKESILPKRNSDKLIARKKDWDPKKYGGFDSPTVAYSVLVVAKVEKGKSKKLKSVKELLGITIMERSSFEKNPIDFLEAKGYKEVKKDLIIKLPKYSLFELENGRKRMLASGELQKGNELALPSKYVNFLYLASHYEKLKGSPEDNEQKQLFVEQHKHYLDEIIEQISEFSKRVILADANLDKVLSAYNKHRDKPIREQAENIIHLFTLTNLGAPAAFKYFDTTIDRKRYTSTKEVLDATLIHQSITGLYETRIDLSQLGGD

SEQ ID NO: 259 - protein, 1359 aa, Artificial Sequence; identical to SEQ ID NO: 11
  Synthetic Polypeptide

SEQ ID NO: 260 - protein, 1359 aa, Artificial Sequence; identical to SEQ ID NO: 258
  Synthetic Polypeptide

SEQ ID NO: 261-262 - skipped (2 entries)

SEQ ID NO: 263 - protein, 1368 aa, Artificial Sequence; identical to SEQ ID NO: 9
  Synthetic Polypeptide

SEQ ID NO: 264 - skipped

SEQ ID NO: 265 - protein, 4 aa, Artificial Sequence
  Synthetic Polypeptide
  VARIANT (1)...(4): Can be present in repeats of any integer between 1 to 30
GGGS

SEQ ID NO: 266 - protein, 198 aa, Homo sapiens [sequence omitted]

SEQ ID NO: 267 - protein, 198 aa, Mus musculus
MDSLLMKQKKFLYHFKNVRWAKGRHETYLCYVVKRRDSATSCSLDFGHLRNKSGCHVELLFLRYISDWDLDPGRCYRVTWFTSWSPCYDCARHVAEFLRWNPNLSLRIFTARLYFCEDRKAEPEGLRRLHRAGVQIGIMTFKDYFYCWNTFVENRERTFKAWEGLHENSVRLTRQLRRILLPLYEVDDLRDAFRMLGF

SEQ ID NO: 268 - protein, 198 aa, Canis lupus
MDSLLMKQRKFLYHFKNVRWAKGRHETYLCYVVKRRDSATSFSLDFGHLRNKSGCHVELLFLRYISDWDLDPGRCYRVTWFTSWSPCYDCARHVADFLRGYPNLSLRIFAARLYFCEDRKAEPEGLRRLHRAGVQIAIMTFKDYFYCWNTFVENREKTFKAWEGLHENSVRLSRQLRRILLPLYEVDDLRDAFRTLGL

SEQ ID NO: 269 - protein, 199 aa, Bos taurus
MDSLLKKQRQFLYQFKNVRWAKGRHETYLCYVVKRRDSPTSFSLDFGHLRNKAGCHVELLFLRYISDWDLDPGRCYRVTWFTSWSPCYDCARHVADFLRGYPNLSLRIFTARLYFCDKERKAEPEGLRRLHRAGVQIAIMTFKDYFYCWNTFVENHERTFKAWEGLHENSVRLSRQLRRILLPLYEVDDLRDAFRTLGL

SEQ ID NO: 270 - protein, 429 aa, Mus musculus
MGPFCLGCSHRKCYSPIRNLISQETFKFHFKNLGYAKGRKDTFLCYEVTRKDCDSPVSLHHGVFKNKDNIHAEICFLYWFHDKVLKVLSPREEFKITWYMSWSPCFECAEQIVRFLATHHNLSLDIFSSRLYNVQDPETQQNLCRLVQEGAQVAAMDLYEFKKCWKKFVDNGGRRFRPWKRLLTNFRYQDSKLQEILRPCYIPVPSSSSSTLSNICLTKGLPETRFCVEGRRMDPLSEEEFYSQFYNQRVKHLCYYHRMKPYLCYQLEQFNGQAPLKGCLLSEKGKQHAEILFLDKIRSMELSQVTITCYLTWSPCPNCAWQLAAFKRDRPDLILHIYTSRLYFHWKRPFQKGLCSLWQSGILVDVMDLPQFTDCWTNFVNPKRPFWPWKGLEIISRRTQRRLRRIKESWGLQDLVNDFGNLQLGPPMS

SEQ ID NO: 271 - protein, 429 aa, Rattus rattus
MGPFCLGCSHRKCYSPIRNLISQETFKFHFKNLRYAIDRKDTFLCYEVTRKDCDSPVSLHHGVFKNKDNIHAEICFLYWFHDKVLKVLSPREEFKITWYMSWSPCFECAEQVLRFLATHHNLSLDIFSSRLYNIRDPENQQNLCRLVQEGAQVAAMDLYEFKKCWKKFVDNGGRRFRPWKKLLTNFRYQDSKLQEILRPCYIPVPSSSSSTLSNICLTKGLPETRFCVERRRVHLLSEEEFYSQFYNQRVKHLCYYHGVKPYLCYQLEQFNGQAPLKGCLLSEKGKQHAEILFLDKIRSMELSQVIITCYLTWSPCPNCAWQLAAFKRDRPDLILHIYTSRLYFHWKRPFQKGLCSLWQSGILVDVMDLPQFTDCWTNFVNPKRPFWPWKGLEIISRRTQRRLHRIKESWGLQDLVNDFGNLQLGPPMS

SEQ ID NO: 272 - protein, 370 aa, Macaca mulatta
MVEPMDPRTFVSNFNNRPILSGLNTVWLCCEVKTKDPSGPPLDAKIFQGKVYSKAKYHPEMRFLRWFHKWRQLHHDQEYKVTWYVSWSPCTRCANSVATFLAKDPKVTLTIFVARLYYFWKPDYQQALRILCQKRGGPHATMKIMNYNEFQDCWNKFVDGRGKPFKPRNNLPKHYTLLQATLGELLRHLMDPGTFTSNFNNKPWVSGQHETYLCYKVERLHNDTWVPLNQHRGFLRNQAPNIHGFPKGRHAELCFLDLIPFWKLDGQQYRVTCFTSWSPCFSCAQEMAKFISNNEHVSLCIFAARIYDDQGRYQEGLRALHRDGAKIAMMNYSEFEYCWDTFVDRQGRPFQPWDGLDEHSQALSGRLRAI

SEQ ID NO: 273 - protein, 384 aa, Pan troglodytes
MKPHFRNPVERMYQDTFSDNFYNRPILSHRNTVWLCYEVKTKGPSRPPLDAKIFRGQVYSKLKYHPEMRFFHWFSKWRKLHRDQEYEVTWYISWSPCTKCTRDVATFLAEDPKVTLTIFVARLYYFWDPDYQEALRSLCQKRDGPRATMKIMNYDEFQHCWSKFVYSQRELFEPWNNLPKYYILLHIMLGEILRHSMDPPTFTSNFNNELWVRGRHETYLCYEVERLHNDTWVLLNQRRGFLCNQAPHKHGFLEGRHAELCFLDVIPFWKLDLHQDYRVTCFTSWSPCFSCAQEMAKFISNNKHVSLCIFAARIYDDQGRCQEGLRTLAKAGAKISIMTYSEFKHCWDTFVDHQGCPFQPWDGLEEHSQALSGRLRAILQNQGN

SEQ ID NO: 274 - protein, 377 aa, Chlorocebus sabaeus
MNPQIRNMVEQMEPDIFVYYFNNRPILSGRNTVWLCYEVKTKDPSGPPLDANIFQGKLYPEAKDHPEMKFLHWFRKWRQLHRDQEYEVTWYVSWSPCTRCANSVATFLAEDPKVTLTIFVARLYYFWKPDYQQALRILCQERGGPHATMKIMNYNEFQHCWNEFVDGQGKPFKPRKNLPKHYTLLHATLGELLRHVMDPGTFTSNFNNKPWVSGQRETYLCYKVERSHNDTWVLLNQHRGFLRNQAPDRHGFPKGRHAELCFLDLIPFWKLDDQQYRVTCFTSWSPCFSCAQKMAKFISNNKHVSLCIFAARIYDDQGRCQEGLRTLHRDGAKIAVMNYSEFEYCWDTFVDRQGRPFQPWDGLDEHSQALSGRLRAI

SEQ ID NO: 275 - protein, 384 aa, Homo sapiens
MKPHFRNTVERMYRDTFSYNFYNRPILSRRNTVWLCYEVKTKGPSRPPLDAKIFRGQVYSELKYHPEMRFFHWFSKWRKLHRDQEYEVTWYISWSPCTKCTRDMATFLAEDPKVTLTIFVARLYYFWDPDYQEALRSLCQKRDGPRATMKIMNYDEFQHCWSKFVYSQRELFEPWNNLPKYYILLHIMLGEILRHSMDPPTFTFNFNNEPWVRGRHETYLCYEVERMHNDTWVLLNQRRGFLCNQAPHKHGFLEGRHAELCFLDVIPFWKLDLDQDYRVTCFTSWSPCFSCAQEMAKFISKNKHVSLCIFTARIYDDQGRCQEGLRTLAEAGAKISIMTYSEFKHCWDTFVDHQGCPFQPWDGLDEHSQDLSGRLRAILQNQEN

SEQ ID NO: 276 - protein, 373 aa, Homo sapiens
MKPHFRNTVERMYRDTFSYNFYNRPILSRRNTVWLCYEVKTKGPSRPRLDAKIFRGQVYSQPEHHAEMCFLSWFCGNQLPAYKCFQITWFVSWTPCPDCVAKLAEFLAEHPNVTLTISAARLYYYWERDYRRALCRLSQAGARVKIMDDEEFAYCWENFVYSEGQPFMPWYKFDDNYAFLHRTLKEILRNPMEAMYPHIFYFHFKNLRKAYGRNESWLCFTMEVVKHHSPVSWKRGVFRNQVDPETHCHAERCFLSWFCDDILSPNTNYEVTWYTSWSPCPECAGEVAEFLARHSNVNLTIFTARLYYFWDTDYQEGLRSLSQEGASVEIMGYKDFKYCWENFVYNDDEPFKPWKGLKYNFLFLDSKLQEILE

SEQ ID NO: 277 - protein, 382 aa, Homo sapiens
MNPQIRNPMERMYRDTFYDNFENEPILYGRSYTWLCYEVKIKRGRSNLLWDTGVFRGQVYFKPQYHAEMCFLSWFCGNQLPAYKCFQITWFVSWTPCPDCVAKLAEFLSEHPNVTLTISAARLYYYWERDYRRALCRLSQAGARVTIMDYEEFAYCWENFVYNEGQQFMPWYKFDENYAFLHRTLKEILRYLMDPDTFTFNFNNDPLVLRRRQTYLCYEVERLDNGTWVLMDQHMGFLCNEAKNLLCGFYGRHAELRFLDLVPSLQLDPAQIYRVTWFISWSPCFSWGCAGEVRAFLQENTHVRLRIFAARIYDYDPLYKEALQMLRDAGAQVSIMTYDEFEYCWDTFVYRQGCPFQPWDGLEEHSQALSGRLRAILQNQGN

SEQ ID NO: 278 - protein, 190 aa, Homo sapiens
MNPQIRNPMKAMYPGTFYFQFKNLWEANDRNETWLCFTVEGIKRRSVVSWKTGVFRNQVDSETHCHAERCFLSWFCDDILSPNTKYQVTWYTSWSPCPDCAGEVAEFLARHSNVNLTIFTARLYYFQYPCYQEGLRSLSQEGVAVEIMDYEDFKYCWENFVYNDNEPFKPWKGLKTNFRLLKRRLRESLQ

SEQ ID NO: 279 - protein, 199 aa, Homo sapiens
MEASPASGPRHLMDPHIFTSNFNNGIGRHKTYLCYEVERLDNGTSVKMDQHRGFLHNQAKNLLCGFYGRHAELRFLDLVPSLQLDPAQIYRVTWFISWSPCFSWGCAGEVRAFLQENTHVRLRIFAARIYDYDPLYKEALQMLRDAGAQVSIMTYDEFKHCWDTFVDHQGCPFQPWDGLDEHSQALSGRLRAILQNQGN

SEQ ID NO: 280 - protein, 200 aa, Homo sapiens
MALLTAETFRLQFNNKRRLRRPYYPRKALLCYQLTPQNGSTPTRGYFENKKKCHAEICFINEIKSMGLDETQCYQVTCYLTWSPCSSCAWELVDFIKAHDHLNLGIFASRLYYHWCKPQQKGLRLLCGSQVPVEVMGFPKFADCWENFVDHEKPLSFNPYKMLEELDKNSRAIKRRLERIKIPGVRAQGRYMDILCDAEV

SEQ ID NO: 281 - protein, 386 aa, Homo sapiens
MNPQIRNPMERMYRDTFYDNFENEPILYGRSYTWLCYEVKIKRGRSNLLWDTGVFRGPVLPKRQSNHRQEVYFRFENHAEMCFLSWFCGNRLPANRRFQITWFVSWNPCLPCVVKVTKFLAEHPNVTLTISAARLYYYRDRDWRWVLLRLHKAGARVKIMDYEDFAYCWENFVCNEGQPFMPWYKFDDNYASLHRTLKEILRNPMEAMYPHIFYFHFKNLLKACGRNESWLCFTMEVTKHHSAVFRKRGVFRNQVDPETHCHAERCFLSWFCDDILSPNTNYEVTWYTSWSPCPECAGEVAEFLARHSNVNLTIFTARLCYFWDTDYQEGLCSLSQEGASVKIMGYKDFVSCWKNFVYSDDEPFKPWKGLQTNFRLLKRRLREILQ

SEQ ID NO: 282 - protein, 236 aa, Homo sapiens
MTSEKGPSTGDPTLRRRIEPWEFDVFYDPRELRKEACLLYEIKWGMSRKIWRSSGKNTTNHVEVNFIKKFTSERDFHPSMSCSITWFLSWSPCWECSQAIREFLSRHPGVTLVIYVARLFWHMDQQNRQGLRDLVNSGVTIQIMRASEYYHCWRNFVNYPPGDEAHWPQYPPLWMMLYALELHCIILSLPPCLKISRRWQNHLTFFRLHLQNCHYQTIPPHILLATGLIHPSVAWR

SEQ ID NO: 283 - protein, 229 aa, Mus musculus
MSSETGPVAVDPTLRRRIEPHEFEVFFDPRELRKETCLLYEINWGGRHSVWRHTSQNTSNHVEVNFLEKFTTERYFRPNTRCSITWFLSWSPCGECSRAITEFLSRHPYVTLFIYIARLYHHTDQRNRQGLRDLISSGVTIQIMTEQEYCYCWRNFVNYPPSNEAYWPRYPHLWVKLYVLELYCIILGLPPCLKILRRKQPQLTFFTITLQTCHYQRIPPHLLWATGLK

SEQ ID NO: 284 - protein, 229 aa, Rattus rattus [sequence omitted]

SEQ ID NO: 285-324 - skipped (40 entries)

SEQ ID NO: 325 - protein, 1367 aa, Artificial Sequence
  Synthetic Polypeptide
DKKYSIGLAIGTNSVGWAVITDEYKVPSKKFKVLGNTDRHSIKKNLIGALLFDSGETAEATRLKRTARRRYTRRKNRICYLQEIFSNEMAKVDDSFFHRLEESFLVEEDKKHERHPIFGNIVDEVAYHEKYPTIYHLRKKLVDSTDKADLRLIYLALAHMIKFRGHFLIEGDLNPDNSDVDKLFIQLVQTYNQLFEENPINASGVDAKAILSARLSKSRRLENLIAQLPGEKKNGLFGNLIALSLGLTPNFKSNFDLAEDAKLQLSKDTYDDDLDNLLAQIGDQYADLFLAAKNLSDAILLSDILRVNTEITKAPLSASMIKRYDEHHQDLTLLKALVRQQLPEKYKEIFFDQSKNGYAGYIDGGASQEEFYKFIKPILEKMDGTEELLVKLNREDLLRKQRTFDNGSIPHQIHLGELHAILRRQEDFYPFLKDNREKIEKILTFRIPYYVGPLARGNSRFAWMTRKSEETITPWNFEEVVDKGASAQSFIERMTAFDKNLPNEKVLPKHSLLYEYFTVYNELTKVKYVTEGMRKPAFLSGEQKKAIVDLLFKTNRKVTVKQLKEDYFKKIECFDSVEISGVEDRFNASLGTYHDLLKIIKDKDFLDNEENEDILEDIVLTLTLFEDREMIEERLKTYAHLFDDKVMKQLKRRRYTGWGALSRKLINGIRDKQSGKTILDFLKSDGFANRNFMALIHDDSLTFKEDIQKAQVSGQGDSLHEHIANLAGSPAIKKGILQTVKVVDELVKVMGRHKPENIVIEMARENQTTQKGQKNSRERMKRIEEGIKELGSQILKEHPVENTQLQNEKLYLYYLQNGRDMYVDQELDINRLSDYDVDHIVPQSFLKDDSIDNKVLTRSDKNRGKSDNVPSEEVVKKMKNYWRQLLNAKLITQRKFDNLTKAERGGLSELDKAGFIKRQLVETRAITKHVAQILDSRMNTKYDENDKLIREVKVITLKSKLVSDFRKDFQFYKVREINNYHHAHDAYLNAVVGTALIKKYPKLESEFVYGDYKVYDVRKMIAKSEQEIGKATAKYFFYSNIMNFFKTEITLANGEIRKRPLIETNGETGEIVWDKGRDFATVRKVLSMPQVNIVKKTEVQTGGFSKESILPKRNSDKLIARKKDWDPKKYGGFDSPTVAYSVLVVAKVEKGKSKKLKSVKELLGITIMERSSFEKNPIDFLEAKGYKEVKKDLIIKLPKYSLFELENGRKRMLASAGELQKGNELALPSKYVNFLYLASHYEKLKGSPEDNEQKQLFVEQHKHYLDEIIEQISEFSKRVILADANLDKVLSAYNKHRDKPIREQAENIIHLFTLTNLGAPAAFKYFDTTIDRKRYTSTKEVLDATLIHQSITGLYETRIDLSQLGGD

SEQ ID NO: 326 - protein, 38 aa, Mus musculus
HAEICFLYWFHDKVLKVLSPREEFKITWYMSWSPCFEC

SEQ ID NO: 327 - protein, 32 aa, Mus musculus
HAEILFLDKIRSMELSQVTITCYLTWSPCPNC

SEQ ID NO: 328 - protein, 38 aa, Rattus rattus; identical to SEQ ID NO: 326

SEQ ID NO: 329 - protein, 32 aa, Rattus rattus
HAEILFLDKIRSMELSQVIITCYLTWSPCPNC

SEQ ID NO: 330 - protein, 36 aa, Macaca mulatta
HPEMRFLRWFHKWRQLHHDQEYKVTWYVSWSPCTRC

SEQ ID NO: 331 - protein, 34 aa, Macaca mulatta
HAELCFLDLIPFWKLDGQQYRVTCFTSWSPCFSC

SEQ ID NO: 332 - protein, 36 aa, Pan troglodytes
HPEMRFFHWFSKWRKLHRDQEYEVTWYISWSPCTKC

SEQ ID NO: 333 - protein, 35 aa, Pan troglodytes
HAELCFLDVIPFWKLDLHQDYRVTCFTSWSPCFSC

SEQ ID NO: 334 - protein, 36 aa, Chlorocebus sabaeus
HPEMKFLHWFRKWRQLHRDQEYEVTWYVSWSPCTRC

SEQ ID NO: 335 - protein, 34 aa, Chlorocebus sabaeus
HAELCFLDLIPFWKLDDQQYRVTCFTSWSPCFSC

SEQ ID NO: 336 - protein, 36 aa, Homo sapiens; identical to SEQ ID NO: 332

SEQ ID NO: 337 - protein, 35 aa, Homo sapiens
HAELCFLDVIPFWKLDLDQDYRVTCFTSWSPCFSC

SEQ ID NO: 338 - protein, 35 aa, Homo sapiens
HAEMCFLSWFCGNQLPAYKCFQITWFVSWTPCPDC

SEQ ID NO: 339 - protein, 35 aa, Homo sapiens
HAERCFLSWFCDDILSPNTNYEVTWYTSWSPCPEC

SEQ ID NO: 340 - protein, 35 aa, Homo sapiens; identical to SEQ ID NO: 338

SEQ ID NO: 341 - protein, 39 aa, Homo sapiens
GRHAELRFLDLVPSLQLDPAQIYRVTWFISWSPCFSWGC

SEQ ID NO: 342 - protein, 36 aa, Homo sapiens
CHAERCFLSWFCDDILSPNTKYQVTWYTSWSPCPDC

SEQ ID NO: 343 - protein, 36 aa, Gorilla gorilla
CHAERCFLSWFCDDILSPNTNYQVTWYTSWSPCPEC

SEQ ID NO: 344 - protein, 37 aa, Homo sapiens
HAELRFLDLVPSLQLDPAQIYRVTWFISWSPCFSWGC

SEQ ID NO: 345 - protein, 32 aa, Macaca mulatta
HVELRFLCEVPSWQLDPAQTYRVTWFISWSPC

SEQ ID NO: 346 - protein, 32 aa, Bos taurus
HAELYFLGKIHSWNLDRNQHYRLTCFISWSPC

SEQ ID NO: 347 - protein, 35 aa, Homo sapiens
HAEICFINEIKSMGLDETQCYQVTCYLTWSPCSSC

SEQ ID NO: 348 - protein, 35 aa, Homo sapiens
HAEMCFLSWFCGNRLPANRRFQITWFVSWNPCLPC

SEQ ID NO: 349 - protein, 35 aa, Homo sapiens; identical to SEQ ID NO: 339

SEQ ID NO: 350 - protein, 1300 aa, Francisella novicida
MSIYQEFVNKYSLSKTLRFELIPQGKTLENIKARGLILDDEKRAKDYKKAKQIIDKYHQFFIEEILSSVCISEDLLQNYSDVYFKLKKSDDDNLQKDFKSAKDTIKKQISEYIKDSEKFKNLFNQNLIDAKKGQESDLILWLKQSKDNGIELFKANSDITDIDEALEIIKSFKGWTTYFKGFHENRKNVYSSNDIPTSIIYRIVDDNLPKFLENKAKYESLKDKAPEAINYEQIKKDLAEELTFDIDYKTSEVNQRVFSLDEVFEIANFNNYLNQSGITKFNTIIGGKFVNGENTKRKGINEYINLYSQQINDKTLKKYKMSVLFKQILSDTESKSFVIDKLEDDSDVVTTMQSFYEQIAAFKTVEEKSIKETLSLLFDDLKAQKLDLSKIYFKNDKSLTDLSQQVFDDYSVIGTAVLEYITQQIAPKNLDNPSKKEQELIAKKTEKAKYLSLETIKLALEEFNKHRDIDKQCRFEEILANFAAIPMIFDEIAQNKDNLAQISIKYQNQGKKDLLQASAEDDVKAIKDLLDQTNNLLHKLKIFHISQSEDKANILDKDEHFYLVFEECYFELANIVPLYNKIRNYITQKPYSDEKFKLNFENSTLANGWDKNKEPDNTAILFIKDDKYYLGVMNKKNNKIFDDKAIKENKGEGYKKIVYKLLPGANKMLPKVFFSAKSIKFYNPSEDILRIRNHSTHTKNGSPQKGYEKFEFNIEDCRKFIDFYKQSISKHPEWKDFGFRFSDTQRYNSIDEFYREVENQGYKLTFENISESYIDSVVNQGKLYLFQIYNKDFSAYSKGRPNLHTLYWKALFDERNLQDVVYKLNGEAELFYRKQSIPKKITHPAKEAIANKNKDNPKKESVFEYDLIKDKRFTEDKFFFHCPITINFKSSGANKFNDEINLLLKEKANDVHILSIDRGERHLAYYTLVDGKGNIIKQDTFNIIGNDRMKTNYHDKLAAIEKDRDSARKDWKKINNIKEMKEGYLSQVVHEIAKLVIEYNAIVVFEDLNFGFKRGRFKVEKQVYQKLEKMLIEKLNYLVFKDNEFDKTGGVLRAYQLTAPFETFKKMGKQTGIIYYVPAGFTSKICPVTGFVNQLYPKYESVSKSQEFFSKFDKICYNLDKGYFEFSFDYKNFGDKAAKGKWTIASFGSRLINFRNSDKNHNWDTREVYPTKELEKLLKDYSIEYGHGECIKAAICGESDKKFFAKLTSVLNTILQMRNSKTGTELDYLISPVADVNGNFFDSRQAPKNMPQDADANGAYHIGLKGLMLLGRIKNNQEGKKLNLVIKNEEYFEFVQNRNN

SEQ ID NO: 351 - protein, 1300 aa, Artificial Sequence
  Synthetic Polypeptide
MSIYQEFVNKYSLSKTLRFELIPQGKTLENIKARGLILDDEKRAKDYKKAKQIIDKYHQFFIEEILSSVCISEDLLQNYSDVYFKLKKSDDDNLQKDFKSAKDTIKKQISEYIKDSEKFKNLFNQNLIDAKKGQESDLILWLKQSKDNGIELFKANSDITDIDEALEIIKSFKGWTTYFKGFHENRKNVYSSNDIPTSIIYRIVDDNLPKFLENKAKYESLKDKAPEAINYEQIKKDLAEELTFDIDYKTSEVNQRVFSLDEVFEIANFNNYLNQSGITKFNTIIGGKFVNGENTKRKGINEYINLYSQQINDKTLKKYKMSVLFKQILSDTESKSFVIDKLEDDSDVVTTMQSFYEQIAAFKTVEEKSIKETLSLLFDDLKAQKLDLSKIYFKNDKSLTDLSQQVFDDYSVIGTAVLEYITQQIAPKNLDNPSKKEQELIAKKTEKAKYLSLETIKLALEEFNKHRDIDKQCRFEEILANFAAIPMIFDEIAQNKDNLAQISIKYQNQGKKDLLQASAEDDVKAIKDLLDQTNNLLHKLKIFHISQSEDKANILDKDEHFYLVFEECYFELANIVPLYNKIRNYITQKPYSDEKFKLNFENSTLANGWDKNKEPDNTAILFIKDDKYYLGVMNKKNNKIFDDKAIKENKGEGYKKIVYKLLPGANKMLPKVFFSAKSIKFYNPSEDILRIRNHSTHTKNGSPQKGYEKFEFNIEDCRKFIDFYKQSISKHPEWKDFGFRFSDTQRYNSIDEFYREVENQGYKLTFENISESYIDSVVNQGKLYLFQIYNKDFSAYSKGRPNLHTLYWKALFDERNLQDVVYKLNGEAELFYRKQSIPKKITHPAKEAIANKNKDNPKKESVFEYDLIKDKRFTEDKFFFHCPITINFKSSGANKFNDEINLLLKEKANDVHILSIARGERHLAYYTLVDGKGNIIKQDTFNIIGNDRMKTNYHDKLAAIEKDRDSARKDWKKINNIKEMKEGYLSQVVHEIAKLVIEYNAIVVFEDLNFGFKRGRFKVEKQVYQKLEKMLIEKLNYLVFKDNEFDKTGGVLRAYQLTAPFETFKKMGKQTGIIYYVPAGFTSKICPVTGFVNQLYPKYESVSKSQEFFSKFDKICYNLDKGYFEFSFDYKNFGDKAAKGKWTIASFGSRLINFRNSDKNHNWDTREVYPTKELEKLLKDYSIEYGHGECIKAAICGESDKKFFAKLTSVLNTILQMRNSKTGTELDYLISPVADVNGNFFDSRQAPKNMPQDADANGAYHIGLKGLMLLGRIKNNQEGKKLNLVIKNEEYFEFVQNRNN

SEQ ID NO: 352 - protein, 1300 aa, Artificial Sequence
  Synthetic Polypeptide
MSIYQEFVNKYSLSKTLRFELIPQGKTLENIKARGLILDDEKRAKDYKKAKQIIDKYHQFFIEEILSSVCISEDLLQNYSDVYFKLKKSDDDNLQKDFKSAKDTIKKQISEYIKDSEKFKNLFNQNLIDAKKGQESDLILWLKQSKDNGIELFKANSDITDIDEALEIIKSFKGWTTYFKGFHENRKNVYSSNDIPTSIIYRIVDDNLPKFLENKAKYESLKDKAPEAINYEQIKKDLAEELTFDIDYKTSEVNQRVFSLDEVFEIANFNNYLNQSGITKFNTIIGGKFVNGENTKRKGINEYINLYSQQINDKTLKKYKMSVLFKQILSDTESKSFVIDKLEDDSDVVTTMQSFYEQIAAFKTVEEKSIKETLSLLFDDLKAQKLDLSKIYFKNDKSLTDLSQQVFDDYSVIGTAVLEYITQQIAPKNLDNPSKKEQELIAKKTEKAKYLSLETIKLALEEFNKHRDIDKQCRFEEILANFAAIPMIFDEIAQNKDNLAQISIKYQNQGKKDLLQASAEDDVKAIKDLLDQTNNLLHKLKIFHISQSEDKANILDKDEHFYLVFEECYFELANIVPLYNKIRNYITQKPYSDEKFKLNFENSTLANGWDKNKEPDNTAILFIKDDKYYLGVMNKKNNKIFDDKAIKENKGEGYKKIVYKLLPGANKMLPKVFFSAKSIKFYNPSEDILRIRNHSTHTKNGSPQKGYEKFEFNIEDCRKFIDFYKQSISKHPEWKDFGFRFSDTQRYNSIDEFYREVENQGYKLTFENISESYIDSVVNQGKLYLFQIYNKDFSAYSKGRPNLHTLYWKALFDERNLQDVVYKLNGEAELFYRKQSIPKKITHPAKEAIANKNKDNPKKESVFEYDLIKDKRFTEDKFFFHCPITINFKSSGANKFNDEINLLLKEKANDVHILSIDRGERHLAYYTLVDGKGNIIKQDTFNIIGNDRMKTNYHDKLAAIEKDRDSARKDWKKINNIKEMKEGYLSQVVHEIAKLVIEYNAIVVFADLNFGFKRGRFKVEKQVYQKLEKMLIEKLNYLVFKDNEFDKTGGVLRAYQLTAPFETFKKMGKQTGIIYYVPAGFTSKICPVTGFVNQLYPKYESVSKSQEFFSKFDKICYNLDKGYFEFSFDYKNFGDKAAKGKWTIASFGSRLINFRNSDKNHNWDTREVYPTKELEKLLKDYSIEYGHGECIKAAICGESDKKFFAKLTSVLNTILQMRNSKTGTELDYLISPVADVNGNFFDSRQAPKNMPQDADANGAYHIGLKGLMLLGRIKNNQEGKKLNLVIKNEEYFEFVQNRNN

SEQ ID NO: 353 - protein, 1300 aa, Artificial Sequence
  Synthetic Polypeptide
MSIYQEFVNKYSLSKTLRFELIPQGKTLENIKARGLILDDEKRAKDYKKAKQIIDKYHQFFIEEILSSVCISEDLLQNYSDVYFKLKKSDDDNLQKDFKSAKDTIKKQISEYIKDSEKFKNLFNQNLIDAKKGQESDLILWLKQSKDNGIELFKANSDITDIDEALEIIKSFKGWTTYFKGFHENRKNVYSSNDIPTSIIYRIVDDNLPKFLENKAKYESLKDKAPEAINYEQIKKDLAEELTFDIDYKTSEVNQRVFSLDEVFEIANFNNYLNQSGITKFNTIIGGKFVNGENTKRKGINEYINLYSQQINDKTLKKYKMSVLFKQILSDTESKSFVIDKLEDDSDVVTTMQSFYEQIAAFKTVEEKSIKETLSLLFDDLKAQKLDLSKIYFKNDKSLTDLSQQVFDDYSVIGTAVLEYITQQIAPKNLDNPSKKEQELIAKKTEKAKYLSLETIKLALEEFNKHRDIDKQCRFEEILANFAAIPMIFDEIAQNKDNLAQISIKYQNQGKKDLLQASAEDDVKAIKDLLDQTNNLLHKLKIFHISQSEDKANILDKDEHFYLVFEECYFELANIVPLYNKIRNYITQKPYSDEKFKLNFENSTLANGWDKNKEPDNTAILFIKDDKYYLGVMNKKNNKIFDDKAIKENKGEGYKKIVYKLLPGANKMLPKVFFSAKSIKFYNPSEDILRIRNHSTHTKNGSPQKGYEKFEFNIEDCRKFIDFYKQSISKHPEWKDFGFRFSDTQRYNSIDEFYREVENQGYKLTFENISESYIDSVVNQGKLYLFQIYNKDFSAYSKGRPNLHTLYWKALFDERNLQDVVYKLNGEAELFYRKQSIPKKITHPAKEAIANKNKDNPKKESVFEYDLIKDKRFTEDKFFFHCPITINFKSSGANKFNDEINLLLKEKANDVHILSIDRGERHLAYYTLVDGKGNIIKQDTFNIIGNDRMKTNYHDKLAAIEKDRDSARKDWKKINNIKEMKEGYLSQVVHEIAKLVIEYNAIVVFEDLNFGFKRGRFKVEKQVYQKLEKMLIEKLNYLVFKDNEFDKTGGVLRAYQLTAPFETFKKMGKQTGIIYYVPAGFTSKICPVTGFVNQLYPKYESVSKSQEFFSKFDKICYNLDKGYFEFSFDYKNFGDKAAKGKWTIASFGSRLINFRNSDKNHNWDTREVYPTKELEKLLKDYSIEYGHGECIKAAICGESDKKFFAKLTSVLNTILQMRNSKTGTELDYLISPVADVNGNFFDSRQAPKNMPQDAAANGAYHIGLKGLMLLGRIKNNQEGKKLNLVIKNEEYFEFVQNRNN

SEQ ID NO: 354 - protein, 1300 aa, Artificial Sequence
  Synthetic Polypeptide
MSIYQEFVNKYSLSKTLRFELIPQGKTLENIKARGLILDDEKRAKDYKKAKQIIDKYHQFFIEEILSSVCISEDLLQNYSDVYFKLKKSDDDNLQKDFKSAKDTIKKQISEYIKDSEKFKNLFNQNLIDAKKGQESDLILWLKQSKDNGIELFKANSDITDIDEALEIIKSFKGWTTYFKGFHENRKNVYSSNDIPTSIIYRIVDDNLPKFLENKAKYESLKDKAPEAINYEQIKKDLAEELTFDIDYKTSEVNQRVFSLDEVFEIANFNNYLNQSGITKFNTIIGGKFVNGENTKRKGINEYINLYSQQINDKTLKKYKMSVLFKQILSDTESKSFVIDKLEDDSDVVTTMQSFYEQIAAFKTVEEKSIKETLSLLFDDLKAQKLDLSKIYFKNDKSLTDLSQQVFDDYSVIGTAVLEYITQQIAPKNLDNPSKKEQELIAKKTEKAKYLSLETIKLALEEFNKHRDIDKQCRFEEILANFAAIPMIFDEIAQNKDNLAQISIKYQNQGKKDLLQASAEDDVKAIKDLLDQTNNLLHKLKIFHISQSEDKANILDKDEHFYLVFEECYFELANIVPLYNKIRNYITQKPYSDEKFKLNFENSTLANGWDKNKEPDNTAILFIKDDKYYLGVMNKKNNKIFDDKAIKENKGEGYKKIVYKLLPGANKMLPKVFFSAKSIKFYNPSEDILRIRNHSTHTKNGSPQKGYEKFEFNIEDCRKFIDFYKQSISKHPEWKDFGFRFSDTQRYNSIDEFYREVENQGYKLTFENISESYIDSVVNQGKLYLFQIYNKDFSAYSKGRPNLHTLYWKALFDERNLQDVVYKLNGEAELFYRKQSIPKKITHPAKEAIANKNKDNPKKESVFEYDLIKDKRFTEDKFFFHCPITINFKSSGANKFNDEINLLLKEKANDVHILSIARGERHLAYYTLVDGKGNIIKQDTFNIIGNDRMKTNYHDKLAAIEKDRDSARKDWKKINNIKEMKEGYLSQVVHEIAKLVIEYNAIVVFADLNFGFKRGRFKVEKQVYQKLEKMLIEKLNYLVFKDNEFDKTGGVLRAYQLTAPFETFKKMGKQTGIIYYVPAGFTSKICPVTGFVNQLYPKYESVSKSQEFFSKFDKICYNLDKGYFEFSFDYKNFGDKAAKGKWTIASFGSRLINFRNSDKNHNWDTREVYPTKELEKLLKDYSIEYGHGECIKAAICGESDKKFFAKLTSVLNTILQMRNSKTGTELDYLISPVADVNGNFFDSRQAPKNMPQDADANGAYHIGLKGLMLLGRIKNNQEGKKLNLVIKNEEYFEFVQNRNN

SEQ ID NO: 355 - protein, 1300 aa, Artificial Sequence
  Synthetic Polypeptide
MSIYQEFVNKYSLSKTLRFELIPQGKTLENIKARGLILDDEKRAKDYKKAKQIIDKYHQFFIEEILSSVCISEDLLQNYSDVYFKLKKSDDDNLQKDFKSAKDTIKKQISEYIKDSEKFKNLFNQNLIDAKKGQESDLILWLKQSKDNGIELFKANSDITDIDEALEIIKSFKGWTTYFKGFHENRKNVYSSNDIPTSIIYRIVDDNLPKFLENKAKYESLKDKAPEAINYEQIKKDLAEELTFDIDYKTSEVNQRVFSLDEVFEIANFNNYLNQSGITKFNTIIGGKFVNGENTKRKGINEYINLYSQQINDKTLKKYKMSVLFKQILSDTESKSFVIDKLEDDSDVVTTMQSFYEQIAAFKTVEEKSIKETLSLLFDDLKAQKLDLSKIYFKNDKSLTDLSQQVFDDYSVIGTAVLEYITQQIAPKNLDNPSKKEQELIAKKTEKAKYLSLETIKLALEEFNKHRDIDKQCRFEEILANFAAIPMIFDEIAQNKDNLAQISIKYQNQGKKDLLQASAEDDVKAIKDLLDQTNNLLHKLKIFHISQSEDKANILDKDEHFYLVFEECYFELANIVPLYNKIRNYITQKPYSDEKFKLNFENSTLANGWDKNKEPDNTAILFIKDDKYYLGVMNKKNNKIFDDKAIKENKGEGYKKIVYKLLPGANKMLPKVFFSAKSIKFYNPSEDILRIRNHSTHTKNGSPQKGYEKFEFNIEDCRKFIDFYKQSISKHPEWKDFGFRFSDTQRYNSIDEFYREVENQGYKLTFENISESYIDSVVNQGKLYLFQIYNKDFSAYSKGRPNLHTLYWKALFDERNLQDVVYKLNGEAELFYRKQSIPKKITHPAKEAIANKNKDNPKKESVFEYDLIKDKRFTEDKFFFHCPITINFKSSGANKFNDEINLLLKEKANDVHILSIARGERHLAYYTLVDGKGNIIKQDTFNIIGNDRMKTNYHDKLAAIEKDRDSARKDWKKINNIKEMKEGYLSQVVHEIAKLVIEYNAIVVFEDLNFGFKRGRFKVEKQVYQKLEKMLIEKLNYLVFKDNEFDKTGGVLRAYQLTAPFETFKKMGKQTGIIYYVPAGFTSKICPVTGFVNQLYPKYESVSKSQEFFSKFDKICYNLDKGYFEFSFDYKNFGDKAAKGKWTIASFGSRLINFRNSDKNHNWDTREVYPTKELEKLLKDYSIEYGHGECIKAAICGESDKKFFAKLTSVLNTILQMRNSKTGTELDYLISPVADVNGNFFDSRQAPKNMPQDAAANGAYHIGLKGLMLLGRIKNNQEGKKLNLVIKNEEYFEFVQNRNN

SEQ ID NO: 356 - protein, 1300 aa, Artificial Sequence
  Synthetic Polypeptide
MSIYQEFVNKYSLSKTLRFELIPQGKTLENIKARGLILDDEKRAKDYKKAKQIIDKYHQFFIEEILSSVCISEDLLQNYSDVYFKLKKSDDDNLQKDFKSAKDTIKKQISEYIKDSEKFKNLFNQNLIDAKKGQESDLILWLKQSKDNGIELFKANSDITDIDEALEIIKSFKGWTTYFKGFHENRKNVYSSNDIPTSIIYRIVDDNLPKFLENKAKYESLKDKAPEAINYEQIKKDLAEELTFDIDYKTSEVNQRVFSLDEVFEIANFNNYLNQSGITKFNTIIGGKFVNGENTKRKGINEYINLYSQQINDKTLKKYKMSVLFKQILSDTESKSFVIDKLEDDSDVVTTMQSFYEQIAAFKTVEEKSIKETLSLLFDDLKAQKLDLSKIYFKNDKSLTDLSQQVFDDYSVIGTAVLEYITQQIAPKNLDNPSKKEQELIAKKTEKAKYLSLETIKLALEEFNKHRDIDKQCRFEEILANFAAIPMIFDEIAQNKDNLAQISIKYQNQGKKDLLQASAEDDVKAIKDLLDQTNNLLHKLKIFHISQSEDKANILDKDEHFYLVFEECYFELANIVPLYNKIRNYITQKPYSDEKFKLNFENSTLANGWDKNKEPDNTAILFIKDDKYYLGVMNKKNNKIFDDKAIKENKGEGYKKIVYKLLPGANKMLPKVFFSAKSIKFYNPSEDILRIRNHSTHTKNGSPQKGYEKFEFNIEDCRKFIDFYKQSISKHPEWKDFGFRFSDTQRYNSIDEFYREVENQGYKLTFENISESYIDSVVNQGKLYLFQIYNKDFSAYSKGRPNLHTLYWKALFDERNLQDVVYKLNGEAELFYRKQSIPKKITHPAKEAIANKNKDNPKKESVFEYDLIKDKRFTEDKFFFHCPITINFKSSGANKFNDEINLLLKEKANDVHILSIDRGERHLAYYTLVDGKGNIIKQDTFNIIGNDRMKTNYHDKLAAIEKDRDSARKDWKKINNIKEMKEGYLSQVVHEIAKLVIEYNAIVVFADLNFGFKRGRFKVEKQVYQKLEKMLIEKLNYLVFKDNEFDKTGGVLRAYQLTAPFETFKKMGKQTGIIYYVPAGFTSKICPVTGFVNQLYPKYESVSKSQEFFSKFDKICYNLDKGYFEFSFDYKNFGDKAAKGKWTIASFGSRLINFRNSDKNHNWDTREVYPTKELEKLLKDYSIEYGHGECIKAAICGESDKKFFAKLTSVLNTILQMRNSKTGTELDYLISPVADVNGNFFDSRQAPKNMPQDAAANGAYHIGLKGLMLLGRIKNNQEGKKLNLVIKNEEYFEFVQNRNN

SEQ ID NO: 357 - protein, 1300 aa, Artificial Sequence
  Synthetic Polypeptide
MSIYQEFVNKYSLSKTLRFELIPQGKTLENIKARGLILDDEKRAKDYKKAKQIIDKYHQFFIEEILSSVCISEDLLQNYSDVYFKLKKSDDDNLQKDFKSAKDTIKKQISEYIKDSEKFKNLFNQNLIDAKKGQESDLILWLKQSKDNGIELFKANSDITDIDEALEIIKSFKGWTTYFKGFHENRKNVYSSNDIPTSIIYRIVDDNLPKFLENKAKYESLKDKAPEAINYEQIKKDLAEELTFDIDYKTSEVNQRVFSLDEVFEIANFNNYLNQSGITKFNTIIGGKFVNGENTKRKGINEYINLYSQQINDKTLKKYKMSVLFKQILSDTESKSFVIDKLEDDSDVVTTMQSFYEQIAAFKTVEEKSIKETLSLLFDDLKAQKLDLSKIYFKNDKSLTDLSQQVFDDYSVIGTAVLEYITQQIAPKNLDNPSKKEQELIAKKTEKAKYLSLETIKLALEEFNKHRDIDKQCRFEEILANFAAIPMIFDEIAQNKDNLAQISIKYQNQGKKDLLQASAEDDVKAIKDLLDQTNNLLHKLKIFHISQSEDKANILDKDEHFYLVFEECYFELANIVPLYNKIRNYITQKPYSDEKFKLNFENSTLANGWDKNKEPDNTAILFIKDDKYYLGVMNKKNNKIFDDKAIKENKGEGYKKIVYKLLPGANKMLPKVFFSAKSIKFYNPSEDILRIRNHSTHTKNGSPQKGYEKFEFNIEDCRKFIDFYKQSISKHPEWKDFGFRFSDTQRYNSIDEFYREVENQGYKLTFENISESYIDSVVNQGKLYLFQIYNKDFSAYSKGRPNLHTLYWKALFDERNLQDVVYKLNGEAELFYRKQSIPKKITHPAKEAIANKNKDNPKKESVFEYDLIKDKRFTEDKFFFHCPITINFKSSGANKFNDEINLLLKEKANDVHILSIARGERHLAYYTLVDGKGNIIKQDTFNIIGNDRMKTNYHDKLAAIEKDRDSARKDWKKINNIKEMKEGYLSQVVHEIAKLVIEYNAIVVFADLNFGFKRGRFKVEKQVYQKLEKMLIEKLNYLVFKDNEFDKTGGVLRAYQLTAPFETFKKMGKQTGIIYYVPAGFTSKICPVTGFVNQLYPKYESVSKSQEFFSKFDKICYNLDKGYFEFSFDYKNFGDKAAKGKWTIASFGSRLINFRNSDKNHNWDTREVYPTKELEKLLKDYSIEYGHGECIKAAICGESDKKFFAKLTSVLNTILQMRNSKTGTELDYLISPVADVNGNFFDSRQAPKNMPQDAAANGAYHIGLKGLMLLGRIKNNQEGKKLNLVIKNEEYFEFVQNRNN

SEQ ID NO: 358 - protein, 1307 aa, Unknown
  Acidaminococcus species
TQFEGFTNLYQVSKTLRFELIPQGKTLKHIQEQGFIEEDKARNDHYKELKPIIDRIYKTYADQCLQLVQLDWENLSAAIDSYRKEKTEETRNALIEEQATYRNAIHDYFIGRTDNLTDAINKRHAEIYKGLFKAELFNGKVLKQLGTVTTTEHENALLRSFDKFTTYFSGFYENRKNVFSAEDISTAIPHRIVQDNFPKFKENCHIFTRLITAVPSLREHFENVKKAIGIFVSTSIEEVFSFPFYNQLLTQTQIDLYNQLLGGISREAGTEKIKGLNEVLNLAIQKNDETAHIIASLPHRFIPLFKQILSDRNTLSFILEEFKSDEEVIQSFCKYKTLLRNENVLETAEALFNELNSIDLTHIFISHKKLETISSALCDHWDTLRNALYERRISELTGKITKSAKEKVQRSLKHEDINLQEIISAAGKELSEAFKQKTSEILSHAHAALDQPLPTTMLKKQEEKEILKSQLDSLLGLYHLLDWFAVDESNEVDPEFSARLTGIKLEMEPSLSFYNKARNYATKKPYSVEKFKLNFQMPTLASGWDVNKEKNNGAILFVKNGLYYLGIMPKQKGRYKALSFEPTEKTSEGFDKMYYDYFPDAAKMIPKCSTQLKAVTAHFQTHTTPILLSNNFIEPLEITKEIYDLNNPEKEPKKFQTAYAKKTGDQKGYREALCKWIDFTRDFLSKYTKTTSIDLSSLRPSSQYKDLGEYYAELNPLLYHISFQRIAEKEIMDAVETGKLYLFQIYNKDFAKGHHGKPNLHTLYWTGLFSPENLAKTSIKLNGQAELFYRPKSRMKRMAHRLGEKMLNKKLKDQKTPIPDTLYQELYDYVNHRLSHDLSDEARALLPNVITKEVSHEIIKDRRFTSDKFFFHVPITLNYQAANSPSKFNQRVNAYLKEHPETPIIGIDRGERNLIYITVIDSTGKILEQRSLNTIQQFDYQKKLDNREKERVAARQAWSVVGTIKDLKQGYLSQVIHEIVDLMIHYQAVVVLENLNFGFKSKRTGIAEKAVYQQFEKMLIDKLNCLVLKDYPAEKVGGVLNPYQLTDQFTSFAKMGTQSGFLFYVPAPYTSKIDPLTGFVDPFVWKTIKNHESRKHFLEGFDFLHYDVKTGDFILHFKMNRNLSFQRGLPGFMPAWDIVFEKNETQFDAKGTPFIAGKRIVPVIENHRFTGRYRDLYPANELIALLEEKGIVFRDGSNILPKLLENDDSHAIDTMVALIRSVLQMRNSNAATGEDYINSPVRDLNGVCFDSRFQNPEWPMDADANGAYHIALKGQLLLNHLKESKDLKLQNGISNQDWLAYIQELRN

SEQ ID NO: 359 - protein, 1228 aa, Unknown
  Lachnospiraceae species
MSKLEKFTNCYSLSKTLRFKAIPVGKTQENIDNKRLLVEDEKRAEDYKGVKKLLDRYYLSFINDVLHSIKLKNLNNYISLFRKKTRTEKENKELENLEINLRKEIAKAFKGNEGYKSLFKKDIIETILPEFLDDKDEIALVNSFNGFTTAFTGFFDNRENMFSEEAKSTSIAFRCINENLTRYISNMDIFEKVDAIFDKHEVQEIKEKILNSDYDVEDFFEGEFFNFVLTQEGIDVYNAIIGGFVTESGEKIKGLNEYINLYNQKTKQKLPKFKPLYKQVLSDRESLSFYGEGYTSDEEVLEVFRNTLNKNSEIFSSIKKLEKLFKNFDEYSSAGIFVKNGPAISTISKDIFGEWNVIRDKWNAEYDDIHLKKKAVVTEKYEDDRRKSFKKIGSFSLEQLQEYADADLSVVEKLKEIIIQKVDEIYKVYGSSEKLFDADFVLEKSLKKNDAVVAIMKDLLDSVKSFENYIKAFFGEGKETNRDESFYGDFVLAYDILLKVDHIYDAIRNYVTQKPYSKDKFKLYFQNPQFMGGWDKDKETDYRATILRYGSKYYLAIMDKKYAKCLQKIDKDDVNGNYEKINYKLLPGPNKMLPKVFFSKKWMAYYNPSEDIQKIYKNGTFKKGDMFNLNDCHKLIDFFKDSISRYPKWSNAYDFNFSETEKYKDIAGFYREVEEQGYKVSFESASKKEVDKLVEEGKLYMFQIYNKDFSDKSHGTPNLHTMYFKLLFDENNHGQIRLSGGAELFMRRASLKKEELVVHPANSPIANKNPDNPKKTTTLSYDVYKDKRFSEDQYELHIPIAINKCPKNIFKINTEVRVLLKHDDNPYVIGIDRGERNLLYIVVVDGKGNIVEQYSLNEIINNFNGIRIKTDYHSLLDKKEKERFEARQNWTSIENIKELKAGYISQVVHKICELVEKYDAVIALEDLNSGFKNSRVKVEKQVYQKFEKMLIDKLNYMVDKKSNPCATGGALKGYQITNKFESFKSMSTQNGFIFYIPAWLTSKIDPSTGFVNLLKTKYTSIADSKKFISSFDRIMYVPEEDLFEFALDYKNFSRTDADYIKKWKLYSYGNRIRIFRNPKKNNVFDWEEVCLTSAYKELFNKYGINYQQGDIRALLCEQSDKAFYSSFMALMSLMLQMRNSITGRTDVDFLISPVKNSDGIFYDSRNYEAQENAILPKNADANGAYNIARKVLWAIGQFKKAEDEKLDKVKIAISNKEWLEYAQTSVKH

SEQ ID NO: 360 - protein, 1307 aa, Artificial Sequence
  Synthetic Polypeptide
TQFEGFTNLYQVSKTLRFELIPQGKTLKHIQEQGFIEEDKARNDHYKELKPIIDRIYKTYADQCLQLVQLDWENLSAAIDSYRKEKTEETRNALIEEQATYRNAIHDYFIGRTDNLTDAINKRHAEIYKGLFKAELFNGKVLKQLGTVTTTEHENALLRSFDKFTTYFSGFYENRKNVFSAEDISTAIPHRIVQDNFPKFKENCHIFTRLITAVPSLREHFENVKKAIGIFVSTSIEEVFSFPFYNQLLTQTQIDLYNQLLGGISREAGTEKIKGLNEVLNLAIQKNDETAHIIASLPHRFIPLFKQILSDRNTLSFILEEFKSDEEVIQSFCKYKTLLRNENVLETAEALFNELNSIDLTHIFISHKKLETISSALCDHWDTLRNALYERRISELTGKITKSAKEKVQRSLKHEDINLQEIISAAGKELSEAFKQKTSEILSHAHAALDQPLPTTMLKKQEEKEILKSQLDSLLGLYHLLDWFAVDESNEVDPEFSARLTGIKLEMEPSLSFYNKARNYATKKPYSVEKFKLNFQMPTLASGWDVNKEKNNGAILFVKNGLYYLGIMPKQKGRYKALSFEPTEKTSEGFDKMYYDYFPDAAKMIPKCSTQLKAVTAHFQTHTTPILLSNNFIEPLEITKEIYDLNNPEKEPKKFQTAYAKKTGDQKGYREALCKWIDFTRDFLSKYTKTTSIDLSSLRPSSQYKDLGEYYAELNPLLYHISFQRIAEKEIMDAVETGKLYLFQIYNKDFAKGHHGKPNLHTLYWTGLFSPENLAKTSIKLNGQAELFYRPKSRMKRMAHRLGEKMLNKKLKDQKTPIPDTLYQELYDYVNHRLSHDLSDEARALLPNVITKEVSHEIIKDRRFTSDKFFFHVPITLNYQAANSPSKFNQRVNAYLKEHPETPIIGIDRGEANLIYITVIDSTGKILEQRSLNTIQQFDYQKKLDNREKERVAARQAWSVVGTIKDLKQGYLSQVIHEIVDLMIHYQAVVVLENLNFGFKSKRTGIAEKAVYQQFEKMLIDKLNCLVLKDYPAEKVGGVLNPYQLTDQFTSFAKMGTQSGFLFYVPAPYTSKIDPLTGFVDPFVWKTIKNHESRKHFLEGFDFLHYDVKTGDFILHFKMNRNLSFQRGLPGFMPAWDIVFEKNETQFDAKGTPFIAGKRIVPVIENHRFTGRYRDLYPANELIALLEEKGIVFRDGSNILPKLLENDDSHAIDTMVALIRSVLQMRNSNAATGEDYINSPVRDLNGVCFDSRFQNPEWPMDADANGAYHIALKGQLLLNHLKESKDLKLQNGISNQDWLAYIQELRN

SEQ ID NO: 361 - protein, 1228 aa, Artificial Sequence
  Synthetic Polypeptide
MSKLEKFTNCYSLSKTLRFKAIPVGKTQENIDNKRLLVEDEKRAEDYKGVKKLLDRYYLSFINDVLHSIKLKNLNNYISLFRKKTRTEKENKELENLEINLRKEIAKAFKGNEGYKSLFKKDIIETILPEFLDDKDEIALVNSFNGFTTAFTGFFDNRENMFSEEAKSTSIAFRCINENLTRYISNMDIFEKVDAIFDKHEVQEIKEKILNSDYDVEDFFEGEFFNFVLTQEGIDVYNAIIGGFVTESGEKIKGLNEYINLYNQKTKQKLPKFKPLYKQVLSDRESLSFYGEGYTSDEEVLEVFRNTLNKNSEIFSSIKKLEKLFKNFDEYSSAGIFVKNGPAISTISKDIFGEWNVIRDKWNAEYDDIHLKKKAVVTEKYEDDRRKSFKKIGSFSLEQLQEYADADLSVVEKLKEIIIQKVDEIYKVYGSSEKLFDADFVLEKSLKKNDAVVAIMKDLLDSVKSFENYIKAFFGEGKETNRDESFYGDFVLAYDILLKVDHIYDAIRNYVTQKPYSKDKFKLYFQNPQFMGGWDKDKETDYRATILRYGSKYYLAIMDKKYAKCLQKIDKDDVNGNYEKINYKLLPGPNKMLPKVFFSKKWMAYYNPSEDIQKIYKNGTFKKGDMFNLNDCHKLIDFFKDSISRYPKWSNAYDFNFSETEKYKDIAGFYREVEEQGYKVSFESASKKEVDKLVEEGKLYMFQIYNKDFSDKSHGTPNLHTMYFKLLFDENNHGQIRLSGGAELFMRRASLKKEELVVHPANSPIANKNPDNPKKTTTLSYDVYKDKRFSEDQYELHIPIAINKCPKNIFKINTEVRVLLKHDDNPYVIGIDRGEANLLYIVVVDGKGNIVEQYSLNEIINNFNGIRIKTDYHSLLDKKEKERFEARQNWTSIENIKELKAGYISQVVHKICELVEKYDAVIALEDLNSGFKNSRVKVEKQVYQKFEKMLIDKLNYMVDKKSNPCATGGALKGYQITNKFESFKSMSTQNGFIFYIPAWLTSKIDPSTGFVNLLKTKYTSIADSKKFISSFDRIMYVPEEDLFEFALDYKNFSRTDADYIKKWKLYSYGNRIRIFRNPKKNNVFDWEEVCLTSAYKELFNKYGINYQQGDIRALLCEQSDKAFYSSFMALMSLMLQMRNSITGRTDVDFLISPVKNSDGIFYDSRNYEAQENAILPKNADANGAYNIARKVLWAIGQFKKAEDEKLDKVKIAISNKEWLEYAQTSVKH

SEQ ID NO: 362 - protein, 1228 aa, Artificial Sequence
  Synthetic Polypeptide
MSKLEKFTNCYSLSKTLRFKAIPVGKTQENIDNKRLLVEDEKRAEDYKGVKKLLDRYYLSFINDVLHSIKLKNLNNYISLFRKKTRTEKENKELENLEINLRKEIAKAFKGNEGYKSLFKKDIIETILPEFLDDKDEIALVNSFNGFTTAFTGFFDNRENMFSEEAKSTSIAFRCINENLTRYISNMDIFEKVDAIFDKHEVQEIKEKILNSDYDVEDFFEGEFFNFVLTQEGIDVYNAIIGGFVTESGEKIKGLNEYINLYNQKTKQKLPKFKPLYKQVLSDRESLSFYGEGYTSDEEVLEVFRNTLNKNSEIFSSIKKLEKLFKNFDEYSSAGIFVKNGPAISTISKDIFGEWNVIRDKWNAEYDDIHLKKKAVVTEKYEDDRRKSFKKIGSFSLEQLQEYADADLSVVEKLKEIIIQKVDEIYKVYGSSEKLFDADFVLEKSLKKNDAVVAIMKDLLDSVKSFENYIKAFFGEGKETNRDESFYGDFVLAYDILLKVDHIYDAIRNYVTQKPYSKDKFKLYFQNPQFMGGWDKDKETDYRATILRYGSKYYLAIMDKKYAKCLQKIDKDDVNGNYEKINYKLLPGPNKMLPKVFFSKKWMAYYNPSEDIQKIYKNGTFKKGDMFNLNDCHKLIDFFKDSISRYPKWSNAYDFNFSETEKYKDIAGFYREVEEQGYKVSFESASKKEVDKLVEEGKLYMFQIYNKDFSDKSHGTPNLHTMYFKLLFDENNHGQIRLSGGAELFMRRASLKKEELVVHPANSPIANKNPDNPKKTTTLSYDVYKDKRFSEDQYELHIPIAINKCPKNIFKINTEVRVLLKHDDNPYVIGIDRGERNLLYIVVVDGKGNIVEQYSLNEIINNFNGIRIKTDYHSLLDKKEKERFEARQNWTSIENIKELKAGYISQVVHKICELVEKYDAVIALEDLNSGFKNSRVKVEKQVYQKFEKMLIDKLNYMVDKKSNPCATGGALKGYQITNKFESFKSMSTQNGFIFYIPAWLTSKIDPSTGFVNLLKTKYTSIADSKKFISSFDRIMYVPEEDLFEFALDYKNFSRTDADYIKKWKLYSYGNRIRIFRNPKKNNVFDWEEVCLTSAYKELFNKYGINYQQGDIRALLCEQSDKAFYSSFMALMSLMLQMANSITGRTDVDFLISPVKNSDGIFYDSRNYEAQENAILPKNADANGAYNIARKVLWAIGQFKKAEDEKLDKVKIAISNKEWLEYAQTSVKH

SEQ ID NO: 363 - protein, 1305 aa, Artificial Sequence
  Synthetic Polypeptide
TQFEGFTNLYQVSKTLRFELIPQGKTLKHIQEQGFIEEDKARNDHYKELKPIIDRIYKTYADQCLQLVQLDWENLSAAIDSYRKEKTEETRNALIEEQATYRNAIHDYFIGRTDNLTDAINKRHAEIYKGLFKAELFNGKVLKQLGTVTTTEHENALLRSFDKFTTYFSGFYENRKNVFSAEDISTAIPHRIVQDNFPKFKENCHIFTRLITAVPSLREHFENVKKAIGIFVSTSIEEVFSFPFYNQLLTQTQIDLYNQLLGGISREAGTEKIKGLNEVLNLAIQKNDETAHIIASLPHRFIPLFKQILSDRNTLSFILEEFKSDEEVIQSFCKYKTLLRNENVLETAEALFNELNSIDLTHIFISHKKLETISSALCDHWDTLRNALYERRISELTGKITKSAKEKVQRSLKHEDINLQEIISAAGKELSEAFKQKTSEILSHAHAALDQPLPTTMLKKQEEKEILKSQLDSLLGLYHLLDWFAVDESNEVDPEFSARLTGIKLEMEPSLSFYNKARNYATKKPYSVEKFKLNFQMPTLASGWDVNKEKNNGAILFVKNGLYYLGIMPKQKGRYKALSFEPTEKTSEGFDKMYYDYFPDAAKMIPKCSTQLKAVTAHFQTHTTPILLSNNFIEPLEITKEIYDLNNPEKEPKKFQTAYAKKGQKGYREALCKWIDFTRDFLSKYTKTTSIDLSSLRPSSQYKDLGEYYAELNPLLYHISFQRIAEKEIMDAVETGKLYLFQIYNKDFAKGHHGKPNLHTLYWTGLFSPENLAKTSIKLNGQAELFYRPKSRMKRMAHRLGEKMLNKKLKDQKTPIPDTLYQELYDYVNHRLSHDLSDEARALLPNVITKEVSHEIIKDRRFTSDKFFFHVPITLNYQAANSPSKFNQRVNAYLKEHPETPIIGIDRGERNLIYITVIDSTGKILEQRSLNTIQQFDYQKKLDNREKERVAARQAWSVVGTIKDLKQGYLSQVIHEIVDLMIHYQAVVVLENLNFGFKSKRTGIAEKAVYQQFEKMLIDKLNCLVLKDYPAEKVGGVLNPYQLTDQFTSFAKMGTQSGFLFYVPAPYTSKIDPLTGFVDPFVWKTIKNHESRKHFLEGFDFLHYDVKTGDFILHFKMNRNLSFQRGLPGFMPAWDIVFEKNETQFDAKGTPFIAGKRIVPVIENHRFTGRYRDLYPANELIALLEEKGIVFRDGSNILPKLLENDDSHAIDTMVALIRSVLQMRNSNAATGEDYINSPVRDLNGVCFDSRFQNPEWPMDADANGAYHIALKGQLLLNHLKESKDLKLQNGISNQDWLAYIQELRN

SEQ ID NO: 364 - protein, 1303 aa, Artificial Sequence
  Synthetic Polypeptide
TQFEGFTNLYQVSKTLRFELIPQGKTLKHIQEQGFIEEDKARNDHYKELKPIIDRIYKTYADQCLQLVQLDWENLSAAIDSYRKEKTEETRNALIEEQATYRNAIHDYFIGRTDNLTDAINKRHAEIYKGLFKAELFNGKVLKQLGTVTTTEHENALLRSFDKFTTYFSGFYENRKNVFSAEDISTAIPHRIVQDNFPKFKENCHIFTRLITAVPSLREHFENVKKAIGIFVSTSIEEVFSFPFYNQLLTQTQIDLYNQLLGGISREAGTEKIKGLNEVLNLAIQKNDETAHIIASLPHRFIPLFKQILSDRNTLSFILEEFKSDEEVIQSFCKYKTLLRNENVLETAEALFNELNSIDLTHIFISHKKLETISSALCDHWDTLRNALYERRISELTGKITKSAKEKVQRSLKHEDINLQEIISAAGKELSEAFKQKTSEILSHAHAALDQPLPTTMLKKQEEKEILKSQLDSLLGLYHLLDWFAVDESNEVDPEFSARLTGIKLEMEPSLSFYNKARNYATKKPYSVEKFKLNFQMPTLASGWDVNKEKNNGAILFVKNGLYYLGIMPKQKGRYKALSFEPTEKTSEGFDKMYYDYFPDAAKMIPKCSTQLKAVTAHFQTHTTPILLSNNFIEPLEITKEIYDLNNPEKEPKKFQTAYAKGKGYREALCKWIDFTRDFLSKYTKTTSIDLSSLRPSSQYKDLGEYYAELNPLLYHISFQRIAEKEIMDAVETGKLYLFQIYNKDFAKGHHGKPNLHTLYWTGLFSPENLAKTSIKLNGQAELFYRPKSRMKRMAHRLGEKMLNKKLKDQKTPIPDTLYQELYDYVNHRLSHDLSDEARALLPNVITKEVSHEIIKDRRFTSDKFFFHVPITLNYQAANSPSKFNQRVNAYLKEHPETPIIGIDRGERNLIYITVIDSTGKILEQRSLNTIQQFDYQKKLDNREKERVAARQAWSVVGTIKDLKQGYLSQVIHEIVDLMIHYQAVVVLENLNFGFKSKRTGIAEKAVYQQFEKMLIDKLNCLVLKDYPAEKVGGVLNPYQLTDQFTSFAKMGTQSGFLFYVPAPYTSKIDPLTGFVDPFVWKTIKNHESRKHFLEGFDFLHYDVKTGDFILHFKMNRNLSFQRGLPGFMPAWDIVFEKNETQFDAKGTPFIAGKRIVPVIENHRFTGRYRDLYPANELIALLEEKGIVFRDGSNILPKLLENDDSHAIDTMVALIRSVLQMRNSNAATGEDYINSPVRDLNGVCFDSRFQNPEWPMDADANGAYHIALKGQLLLNHLKESKDLKLQNGISNQDWLAYIQELRN

SEQ ID NO: 365 - protein, 1301 aa, Artificial Sequence
  Synthetic Polypeptide
TQFEGFTNLYQVSKTLRFELIPQGKTLKHIQEQGFIEEDKARNDHYKELKPIIDRIYKTYADQCLQLVQLDWENLSAAIDSYRKEKTEETRNALIEEQATYRNAIHDYFIGRTDNLTDAINKRHAEIYKGLFKAELFNGKVLKQLGTVTTTEHENALLRSFDKFTTYFSGFYENRKNVFSAEDISTAIPHRIVQDNFPKFKENCHIFTRLITAVPSLREHFENVKKAIGIFVSTSIEEVFSFPFYNQLLTQTQIDLYNQLLGGISREAGTEKIKGLNEVLNLAIQKNDETAHIIASLPHRFIPLFKQILSDRNTLSFILEEFKSDEEVIQSFCKYKTLLRNENVLETAEALFNELNSIDLTHIFISHKKLETISSALCDHWDTLRNALYERRISELTGKITKSAKEKVQRSLKHEDINLQEIISAAGKELSEAFKQKTSEILSHAHAALDQPLPTTMLKKQEEKEILKSQLDSLLGLYHLLDWFAVDESNEVDPEFSARLTGIKLEMEPSLSFYNKARNYATKKPYSVEKFKLNFQMPTLASGWDVNKEKNNGAILFVKNGLYYLGIMPKQKGRYKALSFEPTEKTSEGFDKMYYDYFPDAAKMIPKCSTQLKAVTAHFQTHTTPILLSNNFIEPLEITKEIYDLNNPEKEPKKFQTAYAGGYREALCKWIDFTRDFLSKYTKTTSIDLSSLRPSSQYKDLGEYYAELNPLLYHISFQRIAEKEIMDAVETGKLYLFQIYNKDFAKGHHGKPNLHTLYWTGLFSPENLAKTSIKLNGQAELFYRPKSRMKRMAHRLGEKMLNKKLKDQKTPIPDTLYQELYDYVNHRLSHDLSDEARALLPNVITKEVSHEIIKDRRFTSDKFFFHVPITLNYQAANSPSKFNQRVNAYLKEHPETPIIGIDRGERNLIYITVIDSTGKILEQRSLNTIQQFDYQKKLDNREKERVAARQAWSVVGTIKDLKQGYLSQVIHEIVDLMIHYQAVVVLENLNFGFKSKRTGIAEKAVYQQFEKMLIDKLNCLVLKDYPAEKVGGVLNPYQLTDQFTSFAKMGTQSGFLFYVPAPYTSKIDPLTGFVDPFVWKTIKNHESRKHFLEGFDFLHYDVKTGDFILHFKMNRNLSFQRGLPGFMPAWDIVFEKNETQFDAKGTPFIAGKRIVPVIENHRFTGRYRDLYPANELIALLEEKGIVFRDGSNILPKLLENDDSHAIDTMVALIRSVLQMRNSNAATGEDYINSPVRDLNGVCFDSRFQNPEWPMDADANGAYHIALKGQLLLNHLKESKDLKLQNGISNQDWLAYIQELRN

SEQ ID NO: 366 - protein, 887 aa, Natronobacterium gregoryi
MTVIDLDSTTTADELTSGHTYDISVTLTGVYDNTDEQHPRMSLAFEQDNGERRYITLWKNTTPKDVFTYDYATGSTYIFTNIDYEVKDGYENLTATYQTTVENATAQEVGTTDEDETFAGGEPLDHHLDDALNETPDDAETESDSGHVMTSFASRDQLPEWTLHTYTLTATDGAKTDTEYARRTLAYTVRQELYTDHDAAPVATDGLMLLTPEPLGETPLDLDCGVRVEADETRTLDYTTAKDRLLARELVEEGLKRSLWDDYLVRGIDEVLSKEPVLTCDEFDLHERYDLSVEVGHSGRAYLHINFRHRFVPKLTLADIDDDNIYPGLRVKTTYRPRRGHIVWGLRDECATDSLNTLGNQSVVAYHRNNQTPINTDLLDAIEAADRRVVETRRQGHGDDAVSFPQELLAVEPNTHQIKQFASDGFHQQARSKTRLSASRCSEKAQAFAERLDPVRLNGSTVEFSSEFFTGNNEQQLRLLYENGESVLTFRDGARGAHPDETFSKGIVNPPESFEVAVVLPEQQADTCKAQWDTMADLLNQAGAPPTRSETVQYDAFSSPESISLNVAGAIDPSEVDAAFVVLPPDQEGFADLASPTETYDELKKALANMGIYSQMAYFDRFRDAKIFYTRNVALGLLAAAGGVAFTTEHAMPGDADMFIGIDVSRSYPEDGASGQINIAATATAVYKDGTILGHSSTRPQLGEKLQSTDVRDIMKNAILGYQQVTGESPTHIVIHRDGFMNEDLDPATEFLNEQGVEYDIVEIRKQPQTRLLAVSDVQYDTPVKSIAAINQNEPRATVATFGAPEYLATRDGGGLPRPIQIERVAGETDIETLTRQVYLLSQSHIQVHNSTARLPITTAYADQASTHATKGYLVQTGAFESNVGFL

SEQ ID NO: 367 - protein, 1129 aa, Alicyclobacillus acidoterrestris
MAVKSIKVKLRLDDMPEIRAGLWKLHKEVNAGVRYYTEWLSLLRQENLYRRSPNGDGEQECDKTAEECKAELLERLRARQVENGHRGPAGSDDELLQLARQLYELLVPQAIGAKGDAQQIARKFLSPLADKDAVGGLGIAKAGNKPRWVRMREAGEPGWEEEKEKAETRKSADRTADVLRALADFGLKPLMRVYTDSEMSSVEWKPLRKGQAVRTWDRDMFQQAIERMMSWESWNQRVGQEYAKLVEQKNRFEQKNFVGQEHLVHLVNQLQQDMKEASPGLESKEQTAHYVTGRALRGSDKVFEKWGKLAPDAPFDLYDAEIKNVQRRNTRRFGSHDLFAKLAEPEYQALWREDASFLTRYAVYNSILRKLNHAKMFATFTLPDATAHPIWTRFDKLGGNLHQYTFLFNEFGERRHAIRFHKLLKVENGVAREVDDVTVPISMSEQLDNLLPRDPNEPIALYFRDYGAEQHFTGEFGGAKIQCRRDQLAHMHRRRGARDVYLNVSVRVQSQSEARGERRPPYAAVFRLVGDNHRAFVHFDKLSDYLAEHPDDGKLGSEGLLSGLRVMSVDLGLRTSASISVFRVARKDELKPNSKGRVPFFFPIKGNDNLVAVHERSQLLKLPGETESKDLRAIREERQRTLRQLRTQLAYLRLLVRCGSEDVGRRERSWAKLIEQPVDAANHMTPDWREAFENELQKLKSLHGICSDKEWMDAVYESVRRVWRHMGKQVRDWRKDVRSGERPKIRGYAKDVVGGNSIEQIEYLERQYKFLKSWSFFGKVSGQVIRAEKGSRFAITLREHIDHAKEDRLKKLADRIIMEALGYVYALDERGKGKWVAKYPPCQLILLEELSEYQFNNDRPPSENNQLMQWSHRGVFQELINQAQVHDLLVGTMYAAFSSRFDARTGAPGIRCRRVPARCTQEHNPEPFPWWLNKFVVEHTLDACPLRADDLIPTGEGEIFVSPFSAEEGDFHQIHADLNAAQNLQQRLWSDFDISQIRLRCDWGEVDGELVLIPRLTGKRTADSYSNKVFYTNTGVTYYERERGKKRRKVFAQEKLSEEEAELLVEADEAREKSVVLMRDPSGIINRGNWTRQKEFWSMVNQRIEGYLVKQIRSRVPLQDSACENTGDI

SEQ ID NO: 368 - protein, 1389 aa, Leptotrichia shahii
MGNLFGHKRWYEVRDKKDFKIKRKVKVKRNYDGNKYILNINENNNKEKIDNNKFIRKYINYKKNDNILKEFTRKFHAGNILFKLKGKEGIIRIENNDDFLETEEVVLYIEAYGKSEKLKALGITKKKIIDEAIRQGITKDDKKIEIKRQENEEEIEIDIRDEYTNKTLNDCSIILRIIENDELETKKSIYEIFKNINMSLYKIIEKIIENETEKVFENRYYEEHLREKLLKDDKIDVILTNFMEIREKIKSNLEILGFVKFYLNVGGDKKKSKNKKMLVEKILNINVDLTVEDIADFVIKELEFWNITKRIEKVKKVNNEFLEKRRNRTYIKSYVLLDKHEKFKIERENKKDKIVKFFVENIKNNSIKEKIEKILAEFKIDELIKKLEKELKKGNCDTEIFGIFKKHYKVNFDSKKFSKKSDEEKELYKIIYRYLKGRIEKILVNEQKVRLKKMEKIEIEKILNESILSEKILKRVKQYTLEHIMYLGKLRHNDIDMTTVNTDDFSRLHAKEELDLELITFFASTNMELNKIFSRENINNDENIDFFGGDREKNYVLDKKILNSKIKIIRDLDFIDNKNNITNNFIRKFTKIGTNERNRILHAISKERDLQGTQDDYNKVINIIQNLKISDEEVSKALNLDVVFKDKKNIITKINDIKISEENNNDIKYLPSFSKVLPEILNLYRNNPKNEPFDTIETEKIVLNALIYVNKELYKKLILEDDLEENESKNIFLQELKKTLGNIDEIDENIIENYYKNAQISASKGNNKAIKKYQKKVIECYIGYLRKNYEELFDFSDFKMNIQEIKKQIKDINDNKTYERITVKTSDKTIVINDDFEYIISIFALLNSNAVINKIRNRFFATSVWLNTSEYQNIIDILDEIMQLNTLRNECITENWNLNLEEFIQKMKEIEKDFDDFKIQTKKEIFNNYYEDIKNNILTEFKDDINGCDVLEKKLEKIVIFDDETKFEIDKKSNILQDEQRKLSNINKKDLKKKVDQYIKDKDQEIKSKILCRIIFNSDFLKKYKKEIDNLIEDMESENENKFQEIYYPKERKNELYIYKKNLFLNIGNPNFDKIYGLISNDIKMADAKFLFNIDGKNIRKNKISEIDAILKNLNDKLNGYSKEYKEKYIKKLKENDDFFAKNIQNKNYKSFEKDYNRVSEYKKIRDLVEFNYLNKIESYLIDINWKLAIQMARFERDMHYIVNGLRELGIIKLSGYNTGISRAYPKRNGSDGFYTTTAYYKFFDEESYKKFEKICYGFGIDLSENSEINKPENESIRNYISHFYIVRNPFADYSIAEQIDRVSNLLSYSTRYNNSTYASVFEVFKKDVNLDYDELKKKFKLIGNNDILERLMKPKKVSVLELESYNSDYIKNLIIELLTKIENTNDTL

SEQ ID NO: 369 - protein, 1050 aa, Marine metagenome
MRSNYHGGRNARQWRKQISGLARRTKETVFTYKFPLETDAAEIDFDKAVQTYGIAEGVGHGSLIGLVCAFHLSGFRLFSKAGEAMAFRNRSRYPTDAFAEKLSAIMGIQLPTLSPEGLDLIFQSPPRSRDGIAPVWSENEVRNRLYTNWTGRGPANKPDEHLLEIAGEIAKQVFPKFGGWDDLASDPDKALAAADKYFQSQGDFPSIASLPAAIMLSPANSTVDFEGDYIAIDPAAETLLHQAVSRCAARLGRERPDLDQNKGPFVSSLQDALVSSQNNGLSWLFGVGFQHWKEKSPKELIDEYKVPADQHGAVTQVKSFVDAIPLNPLFDTTHYGEFRASVAGKVRSWVANYWKRLLDLKSLLATTEFTLPESISDPKAVSLFSGLLVDPQGLKKVADSLPARLVSAEEAIDRLMGVGIPTAADIAQVERVADEIGAFIGQVQQFNNQVKQKLENLQDADDEEFLKGLKIELPSGDKEPPAINRISGGAPDAAAEISELEEKLQRLLDARSEHFQTISEWAEENAVTLDPIAAMVELERLRLAERGATGDPEEYALRLLLQRIGRLANRVSPVSAGSIRELLKPVFMEEREFNLFFHNRLGSLYRSPYSTSRHQPFSIDVGKAKAIDWIAGLDQISSDIEKALSGAGEALGDQLRDWINLAGFAISQRLRGLPDTVPNALAQVRCPDDVRIPPLLAMLLEEDDIARDVCLKAFNLYVSAINGCLFGALREGFIVRTRFQRIGTDQIHYVPKDKAWEYPDRLNTAKGPINAAVSSDWIEKDGAVIKPVETVRNLSSTGFAGAGVSEYLVQAPHDWYTPLDLRDVAHLVTGLPVEKNITKLKRLTNRTAFRMVGASSFKTHLDSVLLSDKIKLGDFTIIIDQHYRQSVTYGGKVKISYEPERLQVEAAVPVVDTRDRTVPEPDTLFDHIVAIDLGERSVGFAVFDIKSCLRTGEVKPIHDNNGNPVVGTVAVPSIRRLMKAVRSHRRRRQPNQKVNQTYSTALQNYRENVIGDVCNRIDTLMERYNAFPVLEFQIKNFQAGAKQLEIVYGS

SEQ ID NO: 370 - protein, 345 aa, Sulfolobus islandicus
MEVPLYNIFGDNYIIQVATEAENSTIYNNKVEIDDEELRNVLNLAYKIAKNNEDAAAERRGKAKKKKGEEGETTTSNIILPLSGNDKNPWTETLKCYNFPTTVALSEVFKNFSQVKECEEVSAPSFVKPEFYEFGRSPGMVERTRRVKLEVEPHYLIIAAAGWVLTRLGKAKVSEGDYVGVNVFTPTRGILYSLIQNVNGIVPGIKPETAFGLWIARKVVSSVTNPNVSVVRIYTISDAVGQNPTTINGGFSIDLTKLLEKRYLLSERLEAIARNALSISSNMRERYIVLANYIYEYLTGSKRLEDLLYFANRDLIMNLNSDDGKVRDLKLISAYVNGELIRGEG

SEQ ID NO: 371 - protein, 345 aa, Sulfolobus islandicus
MEVPLYNIFGDNYIIQVATEAENSTIYNNKVEIDDEELRNVLNLAYKIAKNNEDAAAERRGKAKKKKGEEGETTTSNIILPLSGNDKNPWTETLKCYNFPTTVALSEVFKNFSQVKECEEVSAPSFVKPEFYKFGRSPGMVERTRRVKLEVEPHYLIMAAAGWVLTRLGKAKVSEGDYVGVNVFTPTRGILYSLIQNVNGIVPGIKPETAFGLWIARKVVSSVTNPNVSVVSIYTISDAVGQNPTTINGGFSIDLTKLLEKRDLLSERLEAIARNALSISSNMRERYIVLANYIYEYLTGSKRLEDLLYFANRDLIMNLNSDDGKVRDLKLISAYVNGELIRGEG

SEQ ID NO: 372 - protein, 1210 aa, Unknown
  uncultured Parcubacteria group bacterium
MSKRHPRISGVKGYRLHAQRLEYTGKSGAMRTIKYPLYSSPSGGRTVPREIVSAINDDYVGLYGLSNFDDLYNAEKRNEEKVYSVLDFWYDCVQYGAVFSYTAPGLLKNVAEVRGGSYELTKTLKGSHLYDELQIDKVIKFLNKKEISRANGSLDKLKKDIIDCFKAEYRERHKDQCNKLADDIKNAKKDAGASLGERQKKLFRDFFGISEQSENDKPSFTNPLNLTCCLLPFDTVNNNRNRGEVLFNKLKEYAQKLDKNEGSLEMWEYIGIGNSGTAFSNFLGEGFLGRLRENKITELKKAMMDITDAWRGQEQEEELEKRLRILAALTIKLREPKFDNHWGGYRSDINGKLSSWLQNYINQTVKIKEDLKGHKKDLKKAKEMINRFGESDTKEEAVVSSLLESIEKIVPDDSADDEKPDIPAIAIYRRFLSDGRLTLNRFVQREDVQEALIKERLEAEKKKKPKKRKKKSDAEDEKETIDFKELFPHLAKPLKLVPNFYGDSKRELYKKYKNAAIYTDALWKAVEKIYKSAFSSSLKNSFFDTDFDKDFFIKRLQKIFSVYRRFNTDKWKPIVKNSFAPYCDIVSLAENEVLYKPKQSRSRKSAAIDKNRVRLPSTENIAKAGIALARELSVAGFDWKDLLKKEEHEEYIDLIELHKTALALLLAVTETQLDISALDFVENGTVKDFMKTRDGNLVLEGRFLEMFSQSIVFSELRGLAGLMSRKEFITRSAIQTMNGKQAELLYIPHEFQSAKITTPKEMSRAFLDLAPAEFATSLEPESLSEKSLLKLKQMRYYPHYFGYELTRTGQGIDGGVAENALRLEKSPVKKREIKCKQYKTLGRGQNKIVLYVRSSYYQTQFLEWFLHRPKNVQTDVAVSGSFLIDEKKVKTRWNYDALTVALEPVSGSERVFVSQPFTIFPEKSAEEEGQRYLGIDIGEYGIAYTALEITGDSAKILDQNFISDPQLKTLREEVKGLKLDQRRGTFAMPSTKIARIRESLVHSLRNRIHHLALKHKAKIVYELEVSRFEEGKQKIKKVYATLKKADVYSEIDADKNLQTTVWGKLAVASEISASYTSQFCGACKKLWRAEMQVDETITTQELIGTVRVIKGGTLIDAIKDFMRPPIFDENDTPFPKYRDFCDKHHISKKMRGNSCLFICPFCRANADADIQASQTIALLRYVKEEKKVEDYFERFRKLKNIKVLGQMKKI

SEQ ID NO: 373 - protein, 304 aa, Sorghum bicolor
MAPSPPTPAAPKTIADFFARPAKRLRAGSAAPAASLSSSPSSLSPEQRRRADTNLALARARRNLRLAESKAQASGGAPKLEELLVEETWAEALHGELRKPYALELCRFVAHERLHGPLPVYPPPHLVFHALNATPFDRVKAVIIGQDPYHGPGQAMGLSFSVPEGIKIPSSLGNIFKELEKDLGCTVPSHGNLERWAVQGVLMLNTVLTVREHQANSHAKKGWEQFTDAVIKTVSQKKSGLVFLLWGNSAQSKTRLIDETKHHILKSAHPSGLSANRGFFGCRHFSKTNQILEKLGLSAIDWQL

SEQ ID NO: 374 - protein, 303 aa, Zea mays
MPPSPPTPAAPKTIADFFARPAKRLRAAPAASLSSNSSPSSLSPEQRRRADTNLALARARRNLRLAESKAQASGGAPKLEELLVEETWAEALRGELRKSYALELCRFVAHERLHGPLPVYPPPHLVFHALNATPFDRVKAVIIGQDPYHGPGQAMGLSFSVPEGIKIPSSLGNIFKELKKDLGCTVPSHGNLERWAVQGVLMLNTVLTVREHQANSHAKKGWEQFTDEVIKTISQKKSGLVFLLWGNSAQSKTRLIDETKHHILKSAHPSGLSANRGFFGCRHFSKTNEILEKLGLSAIDWQL

SEQ ID NO: 375 - protein, 322 aa, Solanum lycopersicum
MASSSSKTLKDLWKQPAAKRLKQVSSTENFISSALASSSSRKDCDEDPKDVVSSTPEQNSRMEFNRSLAKSKRNLKLCSDKISKLNANGEGGGYVKLQELLIEETWLEALPGEFEKTYAGNLCKFVEKEISGGVPIYPPLHLIFNALNTTAFDRIKAVIIGQDPYHGPGQAMGLSFSVPKGVKVPSSLLNIYKELKQDLGCSIPLHGNLEQWAVQGVLLLNAVLTVRHHQANSHANKGWEQFTDAIIKTISKKKEGVVFILWGNYAQAKARLVDETKHHILKSAHPSGLSANRGFFGCRAWFPLTSQVLCSPTCQRNKWKQL

SEQ ID NO: 376 - protein, 303 aa, Oryza sativa
MAPPLPPTAPKTIADYLIRPSKRLRPTSPAPAAAASAPLSSSSLSPEQRRRADTNLALARARRHLRLAESKASGGTAKLEELLVEETWLEALPGELHKPYALELCRFVAHERLHSPVPVYPPPHLVFHALHATPFDRVKAVIIGQDPYHGPGQAMGLSFSVPEGIKIPSSLANIFKELQKDLGCTVPSHGNLERWAVQGVLMLNTVLTVREHQANSHAKKGWEQFTDAVIKTISLKKSGIVFILWGNSAQAKTRLIDETKHHILKSAHPSGLSASRGFFGCRHFSKTNQILERLGLSAIDWQL

SEQ ID NO: 377 - protein, 307 aa, Glycine max
MASAPSRTLTDFFQPASKRLKPTLPASCKSDDANASTLSVDQKLRMEYNKLLAKSKRNLKLCVERVSKSKVQNAESGLGGVKLEELLVEETWLEALPGELQKPYALTLSKFVESEISGGDGVIFPPTHLIFNALNSTPFHTVKAVILGQDPYHGPGQAMGLSFSVPEGIKVPSSLVNIFKELHQDLGCSIPTHGNLQKWAVQGVLLLNAVLTVRKHQANSHAKKGWEQFTDVVIKTISQKKEGVVFLLWGNSAREKSRLIDARKHHVLTAAHPSGLSANRGFFGCRHFSRTNQLLEQMGIDPIDWQL

SEQ ID NO: 378 - protein, 285 aa, Glycine max
MGWKTFSNPLSDEANSSTLSLEQKSRVEYNKLLAKSKRNLKLCIERVSKSKESDSAGVKLEELLVEETWLDALPDELQKPYALTLSKFVGSEISCGGDDVVFPPTHLIFNALNSTPFHTVKAVILGQVFGCLRVQRDGNFDCIWVHFIAILRYNIRHVPDLCVGICLFTKIAARGMWIIKCHFVYISLPAGLSIRKHQAYSHVKKGWEQFTDAVIKTISQKEGVVFLLWGNSAPEKSRLIDATKHHVLTAAHPSGLSANRGFFGCRHFSCTILEQMGIDPIDSQL

SEQ ID NO: 379 - protein, 310 aa, Triticum aestivum
MAPSPPTAPKTIADFFVRPAKRLRSGATTTTVVVPAASLSPSSGPSDPTSLSPEQRRRADTNLALARARRNLRLAESKAAGGGAKLEELLVEETWLEALSGELRKPYALDLCRFVAHERLHAKVPVYPPPHLVFHALHTTPFHSVKAVIIGQDPYHGPGQAMGLSFSVPEGIKIPSSLQNIFKELHKDLGCTIPSHGNLERWAVQGILMLNTVLTVREHQANSHAKKGWEQFTDAVIKTVSQKKSGLVFILWGNSAQAKIRLIDETKHHILKSAHPSGLSANRGFFGCRHFSQTNQILERLGLSTIDWQL

SEQ ID NO: 380 - DNA, 1425 bp, Zea mays
cttccccaaaacccccccacccaaaggcgaggcagggggagagccgtgcctggtgtggtggctcctgaccaaaacggagtccctcgccgccgccgcttcccgaaatccgccaaatccggagccaatgccgccgtcccctcccaccccggcggcacccaaaactatcgccgacttcttcgcgcgccccgccaagcgcctgcgcgctgccccggccgcctccctctcctccaactcctctccctcctcgctgtcgccggagcagcgccgtcgcgccgacaccaacctggcgctcgcccgcgcgcggcgcaacctccgcctcgccgagtccaaagcgcaagcatcggggggcgcaccgaagctggaggagctcctggtggaggagacgtgggcggaggcgcttcgcggtgagctgcgcaagtcatacgcgctcgagctctgccgcttcgtggcccacgagaggctccacggcccgctgcccgtgtacccgccgccgcacctcgtgttccacgcgctcaacgccaccccgttcgaccgtgtcaaggcagtcatcatcggtcaggatccataccatggccctggtcaggccatggggttgtctttctcagtaccggaggggataaaaataccttctagcttaggtaacatttttaaagagctcaaaaaagacctaggctgcactgtgccatcacatggaaatttggaaagatgggctgtgcagggtgttcttatgctcaataccgtcctaactgtgagggagcatcaagccaactcacatgccaagaaaggatgggagcagtttacggatgaggtcattaagactatatcacaaaagaaatcaggattagtattccttctttggggaaattctgctcaatctaagacaagattgattgacgaaacaaaacatcacatattgaaatctgctcatccatcaggtctgtctgcaaacaggggtttctttggatgcaggcacttctccaaaacaaacgagatcttagagaagctggggctgtctgccatcgattggcagctctagaaaaatcccaagacgacatgtgatttctctgtttgagcttgacaaccaccgttgctgtatggagtggagcagaagcacatgcctcaagggctatcatattcggtcaagattatgtggcgactaaagttgttattcatacatggccaatatggatgtgagtgcttaacgcttcttttgtgccgtgtcttatcctgctttatttactttggcactgtaccagcttgttgcggccattgtggttgtcgtgcgtacgtgcaactactttgcttggcgctaggacacgcccatttgggctgccttgctagatctaagcatctgacgtactagagcttaaccaaccaccctatatatatgcataaagggcctgcctctacggctctaccttccgc

SEQ ID NO: 381 - DNA, 21 bp, Artificial Sequence
  Synthetic Construct
aaataccttctagcttaggta

SEQ ID NO: 382 - DNA, 6153 bp, Zea mays
tgtccctttctacggctccaaacaaatgcggaggtctccactcttctctcttcctccatcttatcatcgcccacgtacacacccaattcctcgcaactgggctcccccgcctccacgacactgccccccgcctcaagtccgccgcctccattcttcagctctcctatcctccggtgagtagcccccctccgcatctctctctctctcgccgatcggatatccgcactcgcactcgcacggcgccgctcgcctgcttgctgcgcggccgcgcctcgtcctccaccagcgcgccgcctgcaccgctcgtcccgccggagttatcttcttttccatctccggcggtctcgtgaagggccgatcgggggaggcaggtaggcagtaggcttggcggagtgggcggccgggcagggttggggcaggggtgaccatggccatggcggcagcggggagggaaggaggtcgccgcgggcggcggcggccggggccggtggacgctgggggcggcaaccgggggcggaggccggggaccggtgaatttgatagggcttttaagctttgaaagcatcgagaatttgtaactggtctgggactggcatggagcaggctgcgatggttcggttcggttgtctgacagaaactgtggcgtagcgaccggatgagatagtgtggagcctagaggggagggcagatgcttcttttttagtctgagatggtggtgctacgaaattgtttagaaaaagttccaggcaacgccatatttgtatctctttttgtaaagcaaatgttttggatgcgaagcacaatgtttggaatcctaaatatgcaattgtctcttgtttctccgtctcgttgttaatccatcaattgttctcagcctagaatatctttatcggtatttaccaacctggatcaatttatatcgtatacgtataccatatgggaaatgtcttcatagctgtgggttgtcttatggctccttgaatttgcagtagtctgcctgtacctattggctgaagcagagctgacccccactttatcaagagttgctcaacaatggacactggctgcctgtcatctatgaatattactggagctagccagacaagatcttttgcggggcaacttcctcctcagagatgttttgcgagtagtcactatacaagctttgccgtgaaaaaacttgtctcaaggaataaaggaaggagatcacaccgtagacatcctgccttgcaggttcagccttttgtttttcactctttcggtgttctcactgtgcttcttgtgaaatcatatttgattaccttttctgcaggttgtctgcaaggattttccaagacctccactagaaagcacaataaactatttggaagctggacagctctcttcattttttagaaacagcgaacgccccagtaagccgttgcaggtcgtggttgctggtgcaggtctgacataattcacgattaatgtttgcacatatgttatttttctttgtaagtggggaacttcaagggaatctttaattggttggtagttttatagtttgtaatgttacttttgcaggattggctggtctatcaacagcgaagtatctggcagatgctggacataaacccatattgcttgaggcaagagatgttttgggtggaaaggtctgataaatacttgcatgactgtttactactctctgaattgctctcattcactgttttcagcatttgttattttatgattttttatgcattgataggtagctgcttggaaggatgaagatggagattggtacgagactgggcttcatatcttttgtaagttacagttctggtccttgaggtcctcttcatcatatttcatgttcttgattatttcttttagaaaaattacagttaaaatgatggtttctacacatattaacaaactgttcagacacaccatcacacaaacttctaaggcactctttccttgtatcatgcctttatttttcctaatggcacaggactttctttcaaggacaatctttaaatatctgtgcaaagtcattattgtgaaaagaaattttgttaacttacagtagttacagaatagcctgaaaagtttgcagacaccttaaacatacagcagcacatgtttcaattcacataaaccatgttgatgatagaccatcatatccataattccacagtcgaatatgtccttatgttcacatatcactggattgctaccattcccttcctagcatatatgacacttattatctatgtgtatgtaaccatgtattttggatttttggtttaagttggagcttatcccaacatacagaatctgtttggcgagcttaggattgaggatcgtttacagtggaaagaacactctatgatattcgccatgccaaacaagccaggagaattcagccggtttgatttcccagaaactttgccagcacctataaatggtaagttatacacaacggtggagttattgcaacaggttctctcatttttgctaatatatggacattattaggggtttattagtgacaataataacattacatcgttaccgttgagcttaactctgctaattgatgtcatactgtgattcactattttgcttttaacagggatatgggccatattgagaaacaatgaaatgcttacctggcccgagaaggtgaagtttgcaatcggacttctgccagcaatggttggtggtcaaccttatgttgaagctcaagatggcttaaccgtttcagaatggatgaaaaagcaggtatgagttaaatatgctgattagactagtctctgtgtagaattgtagatgacattttgcctctcatcaatattagagagcttgtagtttgccagtattttttttcctttcttgtcatatcttctggaagggccatagttagatccataaacgcaattgcttcatatgcttgtactatgtaaagttgtaaacccctttccgtgcaaagttaggctgagcaatgcaatgcttatagttgcattgactgttccagtaaaatccagcggtgttcatccctttaggtcctgcagtgtagcagaaaaggaaaaggcacagtttttttgggtgggggtgggggtggggaggggggctcgctttatcccttccctagacctcactcatgttggagcctccggcactgagtcagccctgccctaactaatatacacgcacaatattcttcagatatggttttactttccatttggaatacagatggtaatatatccttctattgtttatggagccatgtggtgcctgacacaattatttgatcagcacagggtgttcctgatcgggtgaacgatgaggtttttattgcaatgtccaaggcactcaatttcataaatcctgatgagctatctatgcagtgcattttgattgctttgaaccgatttcttcaggtatagctgttctatttaattgtgcaatatattagttgcctgttttgtttgaagaaatagcttacaaatattgatttttattttcttgtctatattctttgtttttacttgagaaaatgctaatatgtacttgcaacgttaagatgccttgtggatcttttgaaaagattactttatgtaaatgtgcaggagaagcatggttctaaaatggcattcttggatggtaatccgcctgaaaggctatgcatgcctattgttgatcacattcggtctaggggtggagaggtccgcctgaattctcgtattaaaaagatagagctgaatcctgatggaactgtaaaacacttcgcacttagtgatggaactcagataactggagatgcttatgtttgtgcaacaccaggtgtgatttgtttccagtaaaccttgtttccttggcagctatccaatttaactgactagtctttgtatttagtcgatatcttcaagcttcttgtacctcaagagtggagtgaaattacttatttcaagaaactggagaagttggtgggagttcctgttatcaatgttcatatatggttagttgattgaaatatttggttctgaactgtgaattgcctgattcccttgtctggattatgcttgttcgtcgagacatttctgaagctttgctgaaaatttctgttgttttgaatacctcaggtttgacagaaaactgaacaacacatatgaccaccttcttttcagcaggtacctctcctggctgtagttaatgcatttattgtgcaataaatcttggttatgattttttatcaacatgttttatgtgctattctggttgaatgtccatctgcagtattaaataccatgtctttttcttttcttttcaggagttcacttttaagtgtctatgcagacatgtcagtaacctgcaaggtaccaacttgaggagcttatcatcattccacaatcattagcatactaaactatatactccctccatcctataaaataaggcatatctttttttggcaaagtctttagagtgaaactttgaccattaatttcttttaaaataggacatcaacaaatacaaattaaacatcatattaaagtatttttaaatacaaattcaagtatataacatgcatacactaaaaatatatgttttttctaaattgttggtcaaagttttaaaacattgacttttctaaaaacatgcacgccttattttatgggatggagggaatatctactatttctagggtctcagcgacctgaattttactttattagcatacaataagtacctgaatcttacttagcatacaatattccacaatcattagcatacaatatgtacctggattttactttattaactacaataaaagacatacaatatccaccttaattttactttattaactacattaaaaaggtatgatgcaatgctgagagttgtctcgtcatgggttcgaagcagcctctccacatttacggaagaaggcttgactgggtttatcccttccacagaccccaccccacttatgcgagagtctctagcactaggtctactttaactacatttaaaaggtcttatggcttatgagatttagaatgaattgattattaagtgtaaatataaatatcttgcacattatgaattttagttgtgtgtgcacatagattatcaaagtgtagtacttcaatcattggtgaacgtgtcactggacactgaatcacgctatgtttggtagcaaatgacatatagatgcacactcacatgtttctttctttctgttttttttttctttctaattctttgtaggaatactatgacccaaaccgttcaatgctggagttggtctttgctcctgcagacgaatggattggtcgaagtgacactgaaatcatcgatgcaactatggaagagctagccaagttatttcctgatgaaattgctgctgatcagagtaaagcaaagattcttaagtatcatattgtgaagacaccgaggtgaggatatttgctgaagacacttcctgacagataaccataagtagctctagctctgataattttatgtgttgttttctaatgtttgtattctggcttgctttgacagatcggtttacaaaactgtcccaaactgtgagccttgccggcctctccaaaggtcacctatcgaaggtttctatctagctggtgattacacaaagcagaaatacctggcttccatggaaggtgcagtcctatccgggaagctttgcgcccagtccattgtgcaggtaaataaatatactcaccgtggtcctggttgtgcataaaagcatcagatttctgtgttgttggatttatttcggtatgatacatgttttgcagctaatgaattaacatttactgcttccaggattatagcaggctcacactcaggagccagaaaagcctacaatcaggagaagttcccgtcccatcttagttgtagttggctttagctatcgtcatccccactgggtgctatcttatctcctatttcaatgggaacccacccaatggtcatgttggagacaacacctgttatggtcctttgaccatctcgtggtgactgtagttgatgtcatattcggatatatatgtaaaaggatctgcatagcaattgttagacctttgggaaagcaaaagcgataaagagatctcagatagatattgtgttctttca

SEQ ID NO: 383 - protein, 571 aa, Zea mays
MDTGCLSSMNITGASQTRSFAGQLPPQRCFASSHYTSFAVKKLVSRNKGRRSHRRHPALQVVCKDFPRPPLESTINYLEAGQLSSFFRNSERPSKPLQVVVAGAGLAGLSTAKYLADAGHKPILLEARDVLGGKVAAWKDEDGDWYETGLHIFFGAYPNIQNLFGELRIEDRLQWKEHSMIFAMPNKPGEFSRFDFPETLPAPINGIWAILRNNEMLTWPEKVKFAIGLLPAMVGGQPYVEAQDGLTVSEWMKKQGVPDRVNDEVFIAMSKALNFINPDELSMQCILIALNRFLQEKHGSKMAFLDGNPPERLCMPIVDHIRSRGGEVRLNSRIKKIELNPDGTVKHFALSDGTQITGDAYVCATPVDIFKLLVPQEWSEITYFKKLEKLVGVPVINVHIWFDRKLNNTYDHLLFSRSSLLSVYADMSVTCKEYYDPNRSMLELVFAPADEWIGRSDTEIIDATMEELAKLFPDEIAADQSKAKILKYHIVKTPRSVYKTVPNCEPCRPLQRSPIEGFYLAGDYTKQKYLASMEGAVLSGKLCAQSIVQDYSRLTLRSQKSLQSGEVPVPS

SEQ ID NO: 384 - DNA, 21 bp, Artificial Sequence
  Synthetic Construct
ttcaggagaagcatggttcta

SEQ ID NO: 385 - DNA, 20 bp, Artificial Sequence
  Synthetic Construct
  misc_feature 1: 5' - phosphorylated
aucuaucuaucuaucuaucu

SEQ ID NO: 386 - protein, 571 aa, Artificial Sequence
  Synthetic Construct
MDTGCLSSMNITGASQTRSFAGQLPPQRCFASSHYTSFAVKKLVSRNKGRRSHRRHPALQVVCKDFPRPPLESTINYLEAGQLSSFFRNSERPSKPLQVVVAGAGLAGLSTAKYLADAGHKPILLEARDVLGGKVAAWKDEDGDWYETGLHIFFGAYPNIQNLFGELRIEDRLQWKEHSMIFAMPNKPGEFSRFDFPETLPAPINGIWAILRNNEMLTWPEKVKFAIGLLPAMVGGQPYVEAQDGLTVSEWMKKQGVPDRVNDEVFIAMSKALNFINPDELSMQCILIALNRFLQEKYGSKMAFLDGNPPERLCMPIVDHIRSRGGEVRLNSRIKKIELNPDGTVKHFALSDGTQITGDAYVCATPVDIFKLLVPQEWSEITYFKKLEKLVGVPVINVHIWFDRKLNNTYDHLLFSRSSLLSVYADMSVTCKEYYDPNRSMLELVFAPADEWIGRSDTEIIDATMEELAKLFPDEIAADQSKAKILKYHIVKTPRSVYKTVPNCEPCRPLQRSPIEGFYLAGDYTKQKYLASMEGAVLSGKLCAQSIVQDYSRLTLRSQKSLQSGEVPVPS

SEQ ID NO: 387-389 - skipped (3 entries)

SEQ ID NO: 390 - protein, 1300 aa, Francisella tularensis subsp. novicida U112; identical to SEQ ID NO: 350

SEQ ID NO: 391 - protein, 1233 aa, Lachnospiraceae bacterium MC2017
MDYGNGQFERRAPLTKTITLRLKPIGETRETIREQKLLEQDAAFRKLVETVTPIVDDCIRKIADNALCHFGTEYDFSCLGNAISKNDSKAIKKETEKVEKLLAKVLTENLPDGLRKVNDINSAAFIQDTLTSFVQDDADKRVLIQELKGKTVLMQRFLTTRITALTVWLPDRVFENFNIFIENAEKMRILLDSPLNEKIMKFDPDAEQYASLEFYGQCLSQKDIDSYNLIISGIYADDEVKNPGINEIVKEYNQQIRGDKDESPLPKLKKLHKQILMPVEKAFFVRVLSNDSDARSILEKILKDTEMLPSKIIEAMKEADAGDIAVYGSRLHELSHVIYGDHGKLSQIIYDKESKRISELMETLSPKERKESKKRLEGLEEHIRKSTYTFDELNRYAEKNVMAAYIAAVEESCAEIMRKEKDLRTLLSKEDVKIRGNRHNTLIVKNYFNAWTVFRNLIRILRRKSEAEIDSDFYDVLDDSVEVLSLTYKGENLCRSYITKKIGSDLKPEIATYGSALRPNSRWWSPGEKFNVKFHTIVRRDGRLYYFILPKGAKPVELEDMDGDIECLQMRKIPNPTIFLPKLVFKDPEAFFRDNPEADEFVFLSGMKAPVTITRETYEAYRYKLYTVGKLRDGEVSEEEYKRALLQVLTAYKEFLENRMIYADLNFGFKDLEEYKDSSEFIKQVETHNTFMCWAKVSSSQLDDLVKSGNGLLFEIWSERLESYYKYGNEKVLRGYEGVLLSILKDENLVSMRTLLNSRPMLVYRPKESSKPMVVHRDGSRVVDRFDKDGKYIPPEVHDELYRFFNNLLIKEKLGEKARKILDNKKVKVKVLESERVKWSKFYDEQFAVTFSVKKNADCLDTTKDLNAEVMEQYSESNRLILIRNTTDILYYLVLDKNGKVLKQRSLNIINDGARDVDWKERFRQVTKDRNEGYNEWDYSRTSNDLKEVYLNYALKEIAEAVIEYNAILIIEKMSNAFKDKYSFLDDVTFKGFETKLLAKLSDLHFRGIKDGEPCSFTNPLQLCQNDSNKILQDGVIFMVPNSMTRSLDPDTGFIFAINDHNIRTKKAKLNFLSKFDQLKVSSEGCLIMKYSGDSLPTHNTDNRVWNCCCNHPITNYDRETKKVEFIEEPVEELSRVLEENGIETDTELNKLNERENVPGKVVDAIYSLVLNYLRGTVSGVAGQRAVYYSPVTGKKYDISFIQAMNLNRKCDYYRIGSKERGEWTDFVAQLIN

SEQ ID NO: 392 - protein, 1241 aa, Butyrivibrio proteoclasticus
MLLYENYTKRNQITKSLRLELRPQGKTLRNIKELNLLEQDKAIYALLERLKPVIDEGIKDIARDTLKNCELSFEKLYEHFLSGDKKAYAKESERLKKEIVKTLIKNLPEGIGKISEINSAKYLNGVLYDFIDKTHKDSEEKQNILSDILETKGYLALFSKFLTSRITTLEQSMPKRVIENFEIYAANIPKMQDALERGAVSFAIEYESICSVDYYNQILSQEDIDSYNRLISGIMDEDGAKEKGINQTISEKNIKIKSEHLEEKPFRILKQLHKQILEEREKAFTIDHIDSDEEVVQVTKEAFEQTKEQWENIKKINGFYAKDPGDITLFIVVGPNQTHVLSQLIYGEHDRIRLLLEEYEKNTLEVLPRRTKSEKARYDKFVNAVPKKVAKESHTFDGLQKMTGDDRLFILYRDELARNYMRIKEAYGTFERDILKSRRGIKGNRDVQESLVSFYDELTKFRSALRIINSGNDEKADPIFYNTFDGIFEKANRTYKAENLCRNYVTKSPADDARIMASCLGTPARLRTHWWNGEENFAINDVAMIRRGDEYYYFVLTPDVKPVDLKTKDETDAQIFVQRKGAKSFLGLPKALFKCILEPYFESPEHKNDKNCVIEEYVSKPLTIDRRAYDIFKNGTFKKTNIGIDGLTEEKFKDDCRYLIDVYKEFIAVYTRYSCFNMSGLKRADEYNDIGEFFSDVDTRLCTMEWIPVSFERINDMVDKKEGLLFLVRSMFLYNRPRKPYERTFIQLFSDSNMEHTSMLLNSRAMIQYRAASLPRRVTHKKGSILVALRDSNGEHIPMHIREAIYKMKNNFDISSEDFIMAKAYLAEHDVAIKKANEDIIRNRRYTEDKFFLSLSYTKNADISARTLDYINDKVEEDTQDSRMAVIVTRNLKDLTYVAVVDEKNNVLEEKSLNEIDGVNYRELLKERTKIKYHDKTRLWQYDVSSKGLKEAYVELAVTQISKLATKYNAVVVVESMSSTFKDKFSFLDEQIFKAFEARLCARMSDLSFNTIKEGEAGSISNPIQVSNNNGNSYQDGVIYFLNNAYTRTLCPDTGFVDVFDKTRLITMQSKRQFFAKMKDIRIDDGEMLFTFNLEEYPTKRLLDRKEWTVKIAGDGSYFDKDKGEYVYVNDIVREQIIPALLEDKAVFDGNMAEKFLDKTAISGKSVELIYKWFANALYGIITKKDGEKIYRSPITGTEIDVSKNTTYNFGKKFMFKQEYRGDGDFLDAFLNYMQAQDIAV

SEQ ID NO: 393 - protein, 1473 aa, Unknown
  Candidatus Peregrinibacteria bacterium GW2011_GWA2_33_10
MSNFFKNFTNLYELSKTLRFELKPVGDTLTNMKDHLEYDEKLQTFLKDQNIDDAYQALKPQFDEIHEEFITDSLESKKAKEIDFSEYLDLFQEKKELNDSEKKLRNKIGETFNKAGEKWKKEKYPQYEWKKGSKIANGADILSCQDMLQFIKYKNPEDEKIKNYIDDTLKGFFTYFGGFNQNRANYYETKKEASTAVATRIVHENLPKFCDNVIQFKHIIKRKKDGTVEKTERKTEYLNAYQYLKNNNKITQIKDAETEKMIESTPIAEKIFDVYYFSSCLSQKQIEEYNRIIGHYNLLINLYNQAKRSEGKHLSANEKKYKDLPKFKTLYKQIGCGKKKDLFYTIKCDTEEEANKSRNEGKESHSVEEIINKAQEAINKYFKSNNDCENINTVPDFINYILTKENYEGVYWSKAAMNTISDKYFANYHDLQDRLKEAKVFQKADKKSEDDIKIPEAIELSGLFGVLDSLADWQTTLFKSSILSNEDKLKIITDSQTPSEALLKMIFNDIEKNMESFLKETNDIITLKKYKGNKEGTEKIKQWFDYTLAINRMLKYFLVKENKIKGNSLDTNISEALKTLIYSDDAEWFKWYDALRNYLTQKPQDEAKENKLKLNFDNPSLAGGWDVNKECSNFCVILKDKNEKKYLAIMKKGENTLFQKEWTEGRGKNLTKKSNPLFEINNCEILSKMEYDFWADVSKMIPKCSTQLKAVVNHFKQSDNEFIFPIGYKVTSGEKFREECKISKQDFELNNKVFNKNELSVTAMRYDLSSTQEKQYIKAFQKEYWELLFKQEKRDTKLTNNEIFNEWINFCNKKYSELLSWERKYKDALTNWINFCKYFLSKYPKTTLFNYSFKESENYNSLDEFYRDVDICSYKLNINTTINKSILDRLVEEGKLYLFEIKNQDSNDGKSIGHKNNLHTIYWNAIFENFDNRPKLNGEAEIFYRKAISKDKLGIVKGKKTKNGTEIIKNYRFSKEKFILHVPITLNFCSNNEYVNDIVNTKFYNFSNLHFLGIDRGEKHLAYYSLVNKNGEIVDQGTLNLPFTDKDGNQRSIKKEKYFYNKQEDKWEAKEVDCWNYNDLLDAMASNRDMARKNWQRIGTIKEAKNGYVSLVIRKIADLAVNNERPAFIVLEDLNTGFKRSRQKIDKSVYQKFELALAKKLNFLVDKNAKRDEIGSPTKALQLTPPVNNYGDIENKKQAGIMLYTRANYTSQTDPATGWRKTIYLKAGPEETTYKKDGKIKNKSVKDQIIETFTDIGFDGKDYYFEYDKGEFVDEKTGEIKPKKWRLYSGENGKSLDRFRGEREKDKYEWKIDKIDIVKILDDLFVNFDKNISLLKQLKEGVELTRNNEHGTGESLRFAINLIQQIRNTGNNERDNDFILSPVRDENGKHFDSREYWDKETKGEKISMPSSGDANGAFNIARKGIIMNAHILANSDSKDLSLFVSDEEWDLHLNNKTEWKKQLNIFSSRKAMA

SEQ ID NO: 394 - protein, 1352 aa, Unknown
  Parcubacteria group bacterium GW2011_GWC2_44_17
MENIFDQFIGKYSLSKTLRFELKPVGKTEDFLKINKVFEKDQTIDDSYNQAKFYFDSLHQKFIDAALASDKTSELSFQNFADVLEKQNKIILDKKREMGALRKRDKNAVGIDRLQKEINDAEDIIQKEKEKIYKDVRTLFDNEAESWKTYYQEREVDGKKITFSKADLKQKGADFLTAAGILKVLKYEFPEEKEKEFQAKNQPSLFVEEKENPGQKRYIFDSFDKFAGYLTKFQQTKKNLYAADGTSTAVATRIADNFIIFHQNTKVFRDKYKNNHTDLGFDEENIFEIERYKNCLLQREIEHIKNENSYNKIIGRINKKIKEYRDQKAKDTKLTKSDFPFFKNLDKQILGEVEKEKQLIEKTREKTEEDVLIERFKEFIENNEERFTAAKKLMNAFCNGEFESEYEGIYLKNKAINTISRRWFVSDRDFELKLPQQKSKNKSEKNEPKVKKFISIAEIKNAVEELDGDIFKAVFYDKKIIAQGGSKLEQFLVIWKYEFEYLFRDIERENGEKLLGYDSCLKIAKQLGIFPQEKEAREKATAVIKNYADAGLGIFQMMKYFSLDDKDRKNTPGQLSTNFYAEYDGYYKDFEFIKYYNEFRNFITKKPFDEDKIKLNFENGALLKGWDENKEYDFMGVILKKEGRLYLGIMHKNHRKLFQSMGNAKGDNANRYQKMIYKQIADASKDVPRLLLTSKKAMEKFKPSQEILRIKKEKTFKRESKNFSLRDLHALIEYYRNCIPQYSNWSFYDFQFQDTGKYQNIKEFTDDVQKYGYKISFRDIDDEYINQALNEGKMYLFEVVNKDIYNTKNGSKNLHTLYFEHILSAENLNDPVFKLSGMAEIFQRQPSVNEREKITTQKNQCILDKGDRAYKYRRYTEKKIMFHMSLVLNTGKGEIKQVQFNKIINQRISSSDNEMRVNVIGIDRGEKNLLYYSVVKQNGEIIEQASLNEINGVNYRDKLIEREKERLKNRQSWKPVVKIKDLKKGYISHVIHKICQLIEKYSAIVVLEDLNMRFKQIRGGIERSVYQQFEKALIDKLGYLVFKDNRDLRAPGGVLNGYQLSAPFVSFEKMRKQTGILFYTQAEYTSKTDPITGFRKNVYISNSASLDKIKEAVKKFDAIGWDGKEQSYFFKYNPYNLADEKYKNSTVSKEWAIFASAPRIRRQKGEDGYWKYDRVKVNEEFEKLLKVWNFVNPKATDIKQEIIKKEKAGDLQGEKELDGRLRNFWHSFIYLFNLVLELRNSFSLQIKIKAGEVIAVDEGVDFIASPVKPFFTTPNPYIPSNLCWLAVENADANGAYNIARKGVMILKKIREHAKKDPEFKKLPNLFISNAEWDEAARDWGKYAGTTALNLDH

SEQ ID NO: 395 - protein, 1250 aa, Smithella sp. SC_K08D17
MQTLFENFTNQYPVSKTLRFELIPQGKTKDFIEQKGLLKKDEDRAEKYKKVKNIIDEYHKDFIEKSLNGLKLDGLEKYKTLYLKQEKDDKDKKAFDKEKENLRKQIANAFRNNEKFKTLFAKELIKNDLMSFACEEDKKNVKEFEAFTTYFTGFHQNRANMYVADEKRTAIASRLIHENLPKFIDNIKIFEKMKKEAPELLSPFNQTLKDMKDVIKGTTLEEIFSLDYFNKTLTQSGIDIYNSVIGGRTPEEGKTKIKGLNEYINTDFNQKQTDKKKRQPKFKQLYKQILSDRQSLSFIAEAFKNDTEILEAIEKFYVNELLHFSNEGKSTNVLDAIKNAVSNLESFNLTKMYFRSGASLTDVSRKVFGEWSIINRALDNYYATTYPIKPREKSEKYEERKEKWLKQDFNVSLIQTAIDEYDNETVKGKNSGKVIADYFAKFCDDKETDLIQKVNEGYIAVKDLLNTPCPENEKLGSNKDQVKQIKAFMDSIMDIMHFVRPLSLKDTDKEKDETFYSLFTPLYDHLTQTIALYNKVRNYLTQKPYSTEKIKLNFENSTLLGGWDLNKETDNTAIILRKDNLYYLGIMDKRHNRIFRNVPKADKKDFCYEKMVYKLLPGANKMLPKVFFSQSRIQEFTPSAKLLENYANETHKKGDNFNLNHCHKLIDFFKDSINKHEDWKNFDFRFSATSTYADLSGFYHEVEHQGYKISFQSVADSFIDDLVNEGKLYLFQIYNKDFSPFSKGKPNLHTLYWKMLFDENNLKDVVYKLNGEAEVFYRKKSIAEKNTTIHKANESIINKNPDNPKATSTFNYDIVKDKRYTIDKFQFHIPITMNFKAEGIFNMNQRVNQFLKANPDINIIGIDRGERHLLYYALINQKGKILKQDTLNVIANEKQKVDYHNLLDKKEGDRATARQEWGVIETIKELKEGYLSQVIHKLTDLMIENNAIIVMEDLNFGFKRGRQKVEKQVYQKFEKMLIDKLNYLVDKNKKANELGGLLNAFQLANKFESFQKMGKQNGFIFYVPAWNTSKTDPATGFIDFLKPRYENLNQAKDFFEKFDSIRLNSKADYFEFAFDFKNFTEKADGGRTKWTVCTTNEDRYAWNRALNNNRGSQEKYDITAELKSLFDGKVDYKSGKDLKQQIASQESADFFKALMKNLSITLSLRHNNGEKGDNEQDYILSPVADSKGRFFDSRKADDDMPKNADANGAYHIALKGLWCLEQISKTDDLKKVKLAISNKEWLEFVQTLKG

SEQ ID NO: 396 - protein, 1307 aa, Acidaminococcus sp. BV3L6
MTQFEGFTNLYQVSKTLRFELIPQGKTLKHIQEQGFIEEDKARNDHYKELKPIIDRIYKTYADQCLQLVQLDWENLSAAIDSYRKEKTEETRNALIEEQATYRNAIHDYFIGRTDNLTDAINKRHAEIYKGLFKAELFNGKVLKQLGTVTTTEHENALLRSFDKFTTYFSGFYENRKNVFSAEDISTAIPHRIVQDNFPKFKENCHIFTRLITAVPSLREHFENVKKAIGIFVSTSIEEVFSFPFYNQLLTQTQIDLYNQLLGGISREAGTEKIKGLNEVLNLAIQKNDETAHIIASLPHRFIPLFKQILSDRNTLSFILEEFKSDEEVIQSFCKYKTLLRNENVLETAEALFNELNSIDLTHIFISHKKLETISSALCDHWDTLRNALYERRISELTGKITKSAKEKVQRSLKHEDINLQEIISAAGKELSEAFKQKTSEILSHAHAALDQPLPTTLKKQEEKEILKSQLDSLLGLYHLLDWFAVDESNEVDPEFSARLTGIKLEMEPSLSFYNKARNYATKKPYSVEKFKLNFQMPTLASGWDVNKEKNNGAILFVKNGLYYLGIMPKQKGRYKALSFEPTEKTSEGFDKMYYDYFPDAAKMIPKCSTQLKAVTAHFQTHTTPILLSNNFIEPLEITKEIYDLNNPEKEPKKFQTAYAKKTGDQKGYREALCKWIDFTRDFLSKYTKTTSIDLSSLRPSSQYKDLGEYYAELNPLLYHISFQRIAEKEIMDAVETGKLYLFQIYNKDFAKGHHGKPNLHTLYWTGLFSPENLAKTSIKLNGQAELFYRPKSRMKRMAHRLGEKMLNKKLKDQKTPIPDTLYQELYDYVNHRLSHDLSDEARALLPNVITKEVSHEIIKDRRFTSDKFFFHVPITLNYQAANSPSKFNQRVNAYLKEHPETPIIGIDRGERNLIYITVIDSTGKILEQRSLNTIQQFDYQKKLDNREKERVAARQAWSVVGTIKDLKQGYLSQVIHEIVDLMIHYQAVVVLENLNFGFKSKRTGIAEKAVYQQFEKMLIDKLNCLVLKDYPAEKVGGVLNPYQLTDQFTSFAKMGTQSGFLFYVPAPYTSKIDPLTGFVDPFVWKTIKNHESRKHFLEGFDFLHYDVKTGDFILHFKMNRNLSFQRGLPGFMPAWDIVFEKNETQFDAKGTPFIAGKRIVPVIENHRFTGRYRDLYPANELIALLEEKGIVFRDGSNILPKLLENDDSHAIDTMVALIRSVLQMRNSNAATGEDYINSPVRDLNGVCFDSRFQNPEWPMDADANGAYHIALKGQLLLNHLKESKDLKLQNGISNQDWLAYIQELRN

SEQ ID NO: 397 - protein, 1206 aa, Lachnospiraceae bacterium MA2020
MYYESLTKQYPVSKTIRNELIPIGKTLDNIRQNNILESDVKRKQNYEHVKGILDEYHKQLINEALDNCTLPSLKIAAEIYLKNQKEVSDREDFNKTQDLLRKEVVEKLKAHENFTKIGKKDILDLLEKLPSISEDDYNALESFRNFYTYFTSYNKVRENLYSDKEKSSTVAYRLINENFPKFLDNVKSYRFVKTAGILADGLGEEEQDSLFIVETFNKTLTQDGIDTYNSQVGKINSSINLYNQKNQKANGFRKIPKMKMLYKQILSDREESFIDEFQSDEVLIDNVESYGSVLIESLKSSKVSAFFDALRESKGKNVYVKNDLAKTAMSNIVFENWRTFDDLLNQEYDLANENKKKDDKYFEKRQKELKKNKSYSLEHLCNLSEDSCNLIENYIHQISDDIENIIINNETFLRIVINEHDRSRKLAKNRKAVKAIKDFLDSIKVLERELKLINSSGQELEKDLIVYSAHEELLVELKQVDSLYNMTRNYLTKKPFSTEKVKLNFNRSTLLNGWDRNKETDNLGVLLLKDGKYYLGIMNTSANKAFVNPPVAKTEKVFKKVDYKLLPVPNQMLPKVFFAKSNIDFYNPSSEIYSNYKKGTHKKGNMFSLEDCHNLIDFFKESISKHEDWSKFGFKFSDTASYNDISEFYREVEKQGYKLTYTDIDETYINDLIERNELYLFQIYNKDFSMYSKGKLNLHTLYFMMLFDQRNIDDVVYKLNGEAEVFYRPASISEDELIIHKAGEEIKNKNPNRARTKETSTFSYDIVKDKRYSKDKFTLHIPITMNFGVDEVKRFNDAVNSAIRIDENVNVIGIDRGERNLLYVVVIDSKGNILEQISLNSIINKEYDIETDYHALLDEREGGRDKARKDWNTVENIRDLKAGYLSQVVNVVAKLVLKYNAIICLEDLNFGFKRGRQKVEKQVYQKFEKMLIDKLNYLVIDKSREQTSPKELGGALNALQLTSKFKSFKELGKQSGVIYYVPAYLTSKIDPTTGFANLFYMKCENVEKSKRFFDGFDFIRFNALENVFEFGFDYRSFTQRACGINSKWTVCTNGERIIKYRNPDKNNMFDEKVVVVTDEMKNLFEQYKIPYEDGRNVKDMIISNEEAEFYRRLYRLLQQTLQMRNSTSDGTRDYIISPVKNKREAYFNSELSDGSVPKDADANGAYNIARKGLWVLEQIRQKSEGEKINLAMTNAEWLEYAQTHLL

SEQ ID NO: 398 - protein, 1238 aa, Candidatus Methanoplasma termitum
MNNYDEFTKLYPIQKTIRFELKPQGRTMEHLETFNFFEEDRDRAEKYKILKEAIDEYHKKFIDEHLTNMSLDWNSLKQISEKYYKSREEKDKKVFLSEQKRMRQEIVSEFKKDDRFKDLFSKKLFSELLKEEIYKKGNHQEIDALKSFDKFSGYFIGLHENRKNMYSDGDEITAISNRIVNENFPKFLDNLQKYQEARKKYPEWIIKAESALVAHNIKMDEVFSLEYFNKVLNQEGIQRYNLALGGYVTKSGEKMMGLNDALNLAHQSEKSSKGRIHMTPLFKQILSEKESFSYIPDVFTEDSQLLPSIGGFFAQIENDKDGNIFDRALELISSYAEYDTERIYIRQADINRVSNVIFGEWGTLGGLMREYKADSINDINLERTCKKVDKWLDSKEFALSDVLEAIKRTGNNDAFNEYISKMRTAREKIDAARKEMKFISEKISGDEESIHIIKTLLDSVQQFLHFFNLFKARQDIPLDGAFYAEFDEVHSKLFAIVPLYNKVRNYLTKNNLNTKKIKLNFKNPTLANGWDQNKVYDYASLIFLRDGNYYLGIINPKRKKNIKFEQGSGNGPFYRKMVYKQIPGPNKNLPRVFLTSTKGKKEYKPSKEIIEGYEADKHIRGDKFDLDFCHKLIDFFKESIEKHKDWSKFNFYFSPTESYGDISEFYLDVEKQGYRMHFENISAETIDEYVEKGDLFLFQIYNKDFVKAATGKKDMHTIYWNAAFSPENLQDVVVKLNGEAELFYRDKSDIKEIVHREGEILVNRTYNGRTPVPDKIHKKLTDYHNGRTKDLGEAKEYLDKVRYFKAHYDITKDRRYLNDKIYFHVPLTLNFKANGKKNLNKMVIEKFLSDEKAHIIGIDRGERNLLYYSIIDRSGKIIDQQSLNVIDGFDYREKLNQREIEMKDARQSWNAIGKIKDLKEGYLSKAVHEITKMAIQYNAIVVMEELNYGFKRGRFKVEKQIYQKFENMLIDKMNYLVFKDAPDESPGGVLNAYQLTNPLESFAKLGKQTGILFYVPAAYTSKIDPTTGFVNLFNTSSKTNAQERKEFLQKFESISYSAKDGGIFAFAFDYRKFGTSKTDHKNVWTAYTNGERMRYIKEKKRNELFDPSKEIKEALTSSGIKYDGGQNILPDILRSNNNGLIYTMYSSFIAAIQMRVYDGKEDYIISPIKNSKGEFFRTDPKRRELPIDADANGAYNIALRGELTMRAIAEKFDPDSEKMAKLELKHKDWFEFMQTRGD

SEQ ID NO: 399 - protein, 1282 aa, Eubacterium eligens
MNGNRSIVYREFVGVIPVAKTLRNELRPVGHTQEHIIQNGLIQEDELRQEKSTELKNIMDDYYREYIDKSLSGVTDLDFTLLFELMNLVQSSPSKDNKKALEKEQSKMREQICTHLQSDSNYKNIFNAKLLKEILPDFIKNYNQYDVKDKAGKLETLALFNGFSTYFTDFFEKRKNVFTKEAVSTSIAYRIVHENSLIFLANMTSYKKISEKALDEIEVIEKNNQDKMGDWELNQIFNPDFYNMVLIQSGIDFYNEICGVVNAHMNLYCQQTKNNYNLFKMRKLHKQILAYTSTSFEVPKMFEDDMSVYNAVNAFIDETEKGNIIGKLKDIVNKYDELDEKRIYISKDFYETLSCFMSGNWNLITGCVENFYDENIHAKGKSKEEKVKKAVKEDKYKSINDVNDLVEKYIDEKERNEFKNSNAKQYIREISNIITDTETAHLEYDDHISLIESEEKADEMKKRLDMYMNMYHWAKAFIVDEVLDRDEMFYSDIDDIYNILENIVPLYNRVRNYVTQKPYNSKKIKLNFQSPTLANGWSQSKEFDNNAIILIRDNKYYLAIFNAKNKPDKKIIQGNSDKKNDNDYKKMVYNLLPGANKMLPKVFLSKKGIETFKPSDYIISGYNAHKHIKTSENFDISFCRDLIDYFKNSIEKHAEWRKYEFKFSATDSYSDISEFYREVEMQGYRIDWTYISEADINKLDEEGKIYLFQIYNKDFAENSTGKENLHTMYFKNIFSEENLKDIIIKLNGQAELFYRRASVKNPVKHKKDSVLVNKTYKNQLDNGDVVRIPIPDDIYNEIYKMYNGYIKESDLSEAAKEYLDKVEVRTAQKDIVKDYRYTVDKYFIHTPITINYKVTARNNVNDMVVKYIAQNDDIHVIGIDRGERNLIYISVIDSHGNIVKQKSYNILNNYDYKKKLVEKEKTREYARKNWKSIGNIKELKEGYISGVVHEIAMLIVEYNAIIAMEDLNYGFKRGRFKVERQVYQKFESMLINKLNYFASKEKSVDEPGGLLKGYQLTYVPDNIKNLGKQCGVIFYVPAAFTSKIDPSTGFISAFNFKSISTNASRKQFFMQFDEIRYCAEKDMFSFGFDYNNFDTYNITMGKTQWTVYTNGERLQSEFNNARRTGKTKSINLTETIKLLLEDNEINYADGHDIRIDMEKMDEDKKSEFFAQLLSLYKLTVQMRNSYTEAEEQENGISYDKIISPVINDEGEFFDSDNYKESDDKECKMPKDADANGAYCIALKGLYEVLKIKSEWTEDGFDRNCLKLPHAEWLDFIQNKRYE

SEQ ID NO: 400 - protein, 1373 aa, Moraxella bovoculi
MLFQDFTHLYPLSKTVRFELKPIDRTLEHIHAKNFLSQDETMADMHQKVKVILDDYHRDFIADMMGEVKLTKLAEFYDVYLKFRKNPKDDELQKQLKDLQAVLRKEIVKPIGNGGKYKAGYDRLFGAKLFKDGKELGDLAKFVIAQEGESSPKLAHLAHFEKFSTYFTGFHDNRKNMYSDEDKHTAIAYRLIHENLPRFIDNLQILTTIKQKHSALYDQIINELTASGLDVSLASHLDGYHKLLTQEGITAYNTLLGGISGEAGSPKIQGINELINSHHNQHCHKSERIAKLRPLHKQILSDGMSVSFLPSKFADDSEMCQAVNEFYRHYADVFAKVQSLFDGFDDHQKDGIYVEHKNLNELSKQAFGDFALLGRVLDGYYVDVVNPEFNERFAKAKTDNAKAKLTKEKDKFIKGVHSLASLEQAIEHYTARHDDESVQAGKLGQYFKHGLAGVDNPIQKIHNNHSTIKGFLERERPAGERALPKIKSGKNPEMTQLRQLKELLDNALNVAHFAKLLTTKTTLDNQDGNFYGEFGVLYDELAKIPTLYNKVRDYLSQKPFSTEKYKLNFGNPTLLNGWDLNKEKDNFGVILQKDGCYYLALLDKAHKKVFDNAPNTGKSIYQKMIYKYLEVRKQFPKVFFSKEAIAINYHPSKELVEIKDKGRQRSDDERLKLYRFILECLKIHPKYDKKFEGAIGDIQLFKKDKKGREVPISEKDLFDKINGIFSSKPKLEMEDFFIGEFKRYNPSQDLVDQYNIYKKIDSNDNRKKENFYNNHPKFKKDLVRYYYESMCKHEEWEESFEFSKKLQDIGCYVDVNELFTEIETRRLNYKISFCNINADYIDELVEQGQLYLFQIYNKDFSPKAHGKPNLHTLYFKALFSEDNLADPIYKLNGEAQIFYRKASLDMNETTIHRAGEVLENKNPDNPKKRQFVYDIIKDKRYTQDKFMLHVPITMNFGVQGMTIKEFNKKVNQSIQQYDEVNVIGIDRGERHLLYLTVINSKGEILEQCSLNDITTASANGTQMTTPYHKILDKREIERLNARVGWGEIETIKELKSGYLSHVVHQISQLMLKYNAIVVLEDLNFGFKRGRFKVEKQIYQNFENALIKKLNHLVLKDKADDEIGSYKNALQLTNNFTDLKSIGKQTGFLFYVPAWNTSKIDPETGFVDLLKPRYENIAQSQAFFGKFDKICYNADKDYFEFHIDYAKFTDKAKNSRQIWTICSHGDKRYVYDKTANQNKGAAKGINVNDELKSLFARHHINEKQPNLVMDICQNNDKEFHKSLMYLLKTLLALRYSNASSDEDFILSPVANDEGVFFNSALADDTQPQNADANGAYHIALKGLWLLNELKNSDDLNKVKLAIDNQTWLNFAQNR

SEQ ID NO: 401 - protein, 1263 aa, Leptospira inadai
MEDYSGFVNIYSIQKTLRFELKPVGKTLEHIEKKGFLKKDKIRAEDYKAVKKIIDKYHRAYIEEVFDSVLHQKKKKDKTRFSTQFIKEIKEFSELYYKTEKNIPDKERLEALSEKLRKMLVGAFKGEFSEEVAEKYKNLFSKELIRNEIEKFCETDEERKQVSNFKSFTTYFTGFHSNRQNIYSDEKKSTAIGYRIIHQNLPKFLDNLKIIESIQRRFKDFPWSDLKKNLKKIDKNIKLTEYFSIDGFVNVLNQKGIDAYNTILGGKSEESGEKIQGLNEYINLYRQKNNIDRKNLPNVKILFKQILGDRETKSFIPEAFPDDQSVLNSITEFAKYLKLDKKKKSIIAELKKFLSSFNRYELDGIYLANDNSLASISTFLFDDWSFIKKSVSFKYDESVGDPKKKIKSPLKYEKEKEKWLKQKYYTISFLNDAIESYSKSQDEKRVKIRLEAYFAEFKSKDDAKKQFDLLERIEEAYAIVEPLLGAEYPRDRNLKADKKEVGKIKDFLDSIKSLQFFLKPLLSAEIFDEKDLGFYNQLEGYYEEIDSIGHLYNKVRNYLTGKIYSKEKFKLNFENSTLLKGWDENREVANLCVIFREDQKYYLGVMDKENNTILSDIPKVKPNELFYEKMVYKLIPTPHMQLPRIIFSSDNLSIYNPSKSILKIREAKSFKEGKNFKLKDCHKFIDFYKESISKNEDWSRFDFKFSKTSSYENISEFYREVERQGYNLDFKKVSKFYIDSLVEDGKLYLFQIYNKDFSIFSKGKPNLHTIYFRSLFSKENLKDVCLKLNGEAEMFFRKKSINYDEKKKREGHHPELFEKLKYPILKDKRYSEDKFQFHLPISLNFKSKERLNFNLKVNEFLKRNKDINIIGIDRGERNLLYLVMINQKGEILKQTLLDSMQSGKGRPEINYKEKLQEKEIERDKARKSWGTVENIKELKEGYLSIVIHQISKLMVENNAIVVLEDLNIGFKRGRQKVERQVYQKFEKMLIDKLNFLVFKENKPTEPGGVLKAYQLTDEFQSFEKLSKQTGFLFYVPSWNTSKIDPRTGFIDFLHPAYENIEKAKQWINKFDSIRFNSKMDWFEFTADTRKFSENLMLGKNRVWVICTTNVERYFTSKTANSSIQYNSIQITEKLKELFVDIPFSNGQDLKPEILRKNDAVFFKSLLFYIKTTLSLRQNNGKKGEEEKDFILSPVVDSKGRFFNSLEASDDEPKDADANGAYHIALKGLMNLLVLNETKEENLSRPKWKIKNKDWLEFVWERNR

SEQ ID NO: 402 - skipped

SEQ ID NO: 403 - protein, 1260 aa, Porphyromonas crevioricanis
MDSLKDFTNLYPVSKTLRFELKPVGKTLENIEKAGILKEDEHRAESYRRVKKIIDTYHKVFIDSSLENMAKMGIENEIKAMLQSFCELYKKDHRTEGEDKALDKIRAVLRGLIVGAFTGVCGRRENTVQNEKYESLFKEKLIKEILPDFVLSTEAESLPFSVEEATRSLKEFDSFTSYFAGFYENRKNIYSTKPQSTAIAYRLIHENLPKFIDNILVFQKIKEPIAKELEHIRADFSAGGYIKKDERLEDIFSLNYYIHVLSQAGIEKYNALIGKIVTEGDGEMKGLNEHINLYNQQRGREDRLPLFRPLYKQILSDREQLSYLPESFEKDEELLRALKEFYDHIAEDILGRTQQLMTSISEYDLSRIYVRNDSQLTDISKKMLGDWNAIYMARERAYDHEQAPKRITAKYERDRIKALKGEESISLANLNSCIAFLDNVRDCRVDTYLSTLGQKEGPHGLSNLVENVFASYHEAEQLLSFPYPEENNLIQDKDNVVLIKNLLDNISDLQRFLKPLWGMGDEPDKDERFYGEYNYIRGALDQVIPLYNKVRNYLTRKPYSTRKVKLNFGNSQLLSGWDRNKEKDNSCVILRKGQNFYLAIMNNRHKRSFENKMLPEYKEGEPYFEKMDYKFLPDPNKMLPKVFLSKKGIEIYKPSPKLLEQYGHGTHKKGDTFSMDDLHELIDFFKHSIEAHEDWKQFGFKFSDTATYENVSSFYREVEDQGYKLSFRKVSESYVYSLIDQGKLYLFQIYNKDFSPCSKGTPNLHTLYWRMLFDERNLADVIYKLDGKAEIFFREKSLKNDHPTHPAGKPIKKKSRQKKGEESLFEYDLVKDRRYTMDKFQFHVPITMNFKCSAGSKVNDMVNAHIREAKDMHVIGIDRGERNLLYICVIDSRGTILDQISLNTINDIDYHDLLESRDKDRQQEHRNWQTIEGIKELKQGYLSQAVHRIAELMVAYKAVVALEDLNMGFKRGRQKVESSVYQQFEKQLIDKLNYLVDKKKRPEDIGGLLRAYQFTAPFKSFKEMGKQNGFLFYIPAWNTSNIDPTTGFVNLFHVQYENVDKAKSFFQKFDSISYNPKKDWFEFAFDYKNFTKKAEGSRSMWILCTHGSRIKNFRNSQKNGQWDSEEFALTEAFKSLFVRYEIDYTADLKTAIVDEKQKDFFVDLLKLFKLTVQMRNSWKEKDLDYLISPVAGADGRFFDTREGNKSLPKDADANGAYNIALKGLWALRQIRQTSEGGKLKLAISNKEWLQFVQERSYEKD

SEQ ID NO: 404 - protein, 1323 aa, Prevotella disiens
MENYQEFTNLFQLNKTLRFELKPIGKTCELLEEGKIFASGSFLEKDKVRADNVSYVKKEIDKKHKIFIEETLSSFSISNDLLKQYFDCYNELKAFKKDCKSDEEEVKKTALRNKCTSIQRAMREAISQAFLKSPQKKLLAIKNLIENVFKADENVQHFSEFTSYFSGFETNRENFYSDEEKSTSIAYRLVHDNLPIFIKNIYIFEKLKEQFDAKTLSEIFENYKLYVAGSSLDEVFSLEYFNNTLTQKGIDNYNAVIGKIVKEDKQEIQGLNEHINLYNQKHKDRRLPFFISLKKQILSDREALSWLPDMFKNDSEVIKALKGFYIEDGFENNVLTPLATLLSSLDKYNLNGIFIRNNEALSSLSQNVYRNFSIDEAIDANAELQTFNNYELIANALRAKIKKETKQGRKSFEKYEEYIDKKVKAIDSLSIQEINELVENYVSEFNSNSGNMPRKVEDYFSLMRKGDFGSNDLIENIKTKLSAAEKLLGTKYQETAKDIFKKDENSKLIKELLDATKQFQHFIKPLLGTGEEADRDLVFYGDFLPLYEKFEELTLLYNKVRNRLTQKPYSKDKIRLCFNKPKLMTGWVDSKTEKSDNGTQYGGYLFRKKNEIGEYDYFLGISSKAQLFRKNEAVIGDYERLDYYQPKANTIYGSAYEGENSYKEDKKRLNKVIIAYIEQIKQTNIKKSIIESISKYPNISDDDKVTPSSLLEKIKKVSIDSYNGILSFKSFQSVNKEVIDNLLKTISPLKNKAEFLDLINKDYQIFTEVQAVIDEICKQKTFIYFPISNVELEKEMGDKDKPLCLFQISNKDLSFAKTFSANLRKKRGAENLHTMLFKALMEGNQDNLDLGSGAIFYRAKSLDGNKPTHPANEAIKCRNVANKDKVSLFTYDIYKNRRYMENKFLFHLSIVQNYKAANDSAQLNSSATEYIRKADDLHIIGIDRGERNLLYYSVIDMKGNIVEQDSLNIIRNNDLETDYHDLLDKREKERKANRQNWEAVEGIKDLKKGYLSQAVHQIAQLMLKYNAIIALEDLGQMFVTRGQKIEKAVYQQFEKSLVDKLSYLVDKKRPYNELGGILKAYQLASSITKNNSDKQNGFLFYVPAWNTSKIDPVTGFTDLLRPKAMTIKEAQDFFGAFDNISYNDKGYFEFETNYDKFKIRMKSAQTRWTICTFGNRIKRKKDKNYWNYEEVELTEEFKKLFKDSNIDYENCNLKEEIQNKDNRKFFDDLIKLLQLTLQMRNSDDKGNDYIISPVANAEGQFFDSRNGDKKLPLDADANGAYNIARKGLWNIRQIKQTKNDKKLNLSISSTEWLDFVREKPYLK

SEQ ID NO: 405 - protein, 1246 aa, Porphyromonas macacae
MKTQHFFEDFTSLYSLSKTIRFELKPIGKTLENIKKNGLIRRDEQRLDDYEKLKKVIDEYHEDFIANILSSFSFSEEILQSYIQNLSESEARAKIEKTMRDTLAKAFSEDERYKSIFKKELVKKDIPVWCPAYKSLCKKFDNFTTSLVPFHENRKNLYTSNEITASIPYRIVHVNLPKFIQNIEALCELQKKMGADLYLEMMENLRNVWPSFVKTPDDLCNLKTYNHLMVQSSISEYNRFVGGYSTEDGTKHQGINEWINIYRQRNKEMRLPGLVFLHKQILAKVDSSSFISDTLENDDQVFCVLRQFRKLFWNTVSSKEDDAASLKDLFCGLSGYDPEAIYVSDAHLATISKNIFDRWNYISDAIRRKTEVLMPRKKESVERYAEKISKQIKKRQSYSLAELDDLLAHYSEESLPAGFSLLSYFTSLGGQKYLVSDGEVILYEEGSNIWDEVLIAFRDLQVILDKDFTEKKLGKDEEAVSVIKKALDSALRLRKFFDLLSGTGAEIRRDSSFYALYTDRMDKLKGLLKMYDKVRNYLTKKPYSIEKFKLHFDNPSLLSGWDKNKELNNLSVIFRQNGYYYLGIMTPKGKNLFKTLPKLGAEEMFYEKMEYKQIAEPMLMLPKVFFPKKTKPAFAPDQSVVDIYNKKTFKTGQKGFNKKDLYRLIDFYKEALTVHEWKLFNFSFSPTEQYRNIGEFFDEVREQAYKVSMVNVPASYIDEAVENGKLYLFQIYNKDFSPYSKGIPNLHTLYWKALFSEQNQSRVYKLCGGGELFYRKASLHMQDTTVHPKGISIHKKNLNKKGETSLFNYDLVKDKRFTEDKFFFHVPISINYKNKKITNVNQMVRDYIAQNDDLQIIGIDRGERNLLYISRIDTRGNLLEQFSLNVIESDKGDLRTDYQKILGDREQERLRRRQEWKSIESIKDLKDGYMSQVVHKICNMVVEHKAIVVLENLNLSFMKGRKKVEKSVYEKFERMLVDKLNYLVVDKKNLSNEPGGLYAAYQLTNPLFSFEELHRYPQSGILFFVDPWNTSLTDPSTGFVNLLGRINYTNVGDARKFFDRFNAIRYDGKGNILFDLDLSRFDVRVETQRKLWTLTTFGSRIAKSKKSGKWMVERIENLSLCFLELFEQFNIGYRVEKDLKKAILSQDRKEFYVRLIYLFNLMMQIRNSDGEEDYILSPALNEKNLQFDSRLIEAKDLPVDADANGAYNVARKGLMVVQRIKRGDHESIHRIGRAQWLRYVQEGIVE

SEQ ID NO: 406 - protein, 1298 aa, Thiomicrospira sp. XS5
MTKTFDSEFFNLYSLQKTVRFELKPVGETASFVEDFKNEGLKRVVSEDERRAVDYQKVKEIIDDYHRDFIEESLNYFPEQVSKDALEQAFHLYQKLKAAKVEEREKALKEWEALQKKLREKVVKCFSDSNKARFSRIDKKELIKEDLINWLVAQNREDDIPTVETFNNFTTYFTGFHENRKNIYSKDDHATAISFRLIHENLPKFFDNVISFNKLKEGFPELKFDKVKEDLEVDYDLKHAFEIEYFVNFVTQAGIDQYNYLLGGKTLEDGTKKQGMNEQINLFKQQQTRDKARQIPKLIPLFKQILSERTESQSFIPKQFESDQELFDSLQKLHNNCQDKFTVLQQAILGLAEADLKKVFIKTSDLNALSNTIFGNYSVFSDALNLYKESLKTKKAQEAFEKLPAHSIHDLIQYLEQFNSSLDAEKQQSTDTVLNYFIKTDELYSRFIKSTSEAFTQVQPLFELEALSSKRRPPESEDEGAKGQEGFEQIKRIKAYLDTLMEAVHFAKPLYLVKGRKMIEGLDKDQSFYEAFEMAYQELESLIIPIYNKARSYLSRKPFKADKFKINFDNNTLLSGWDANKETANASILFKKDGLYYLGIMPKGKTFLFDYFVSSEDSEKLKQRRQKTAEEALAQDGESYFEKIRYKLLPGASKMLPKVFFSNKNIGFYNPSDDILRIRNTASHTKNGTPQKGHSKVEFNLNDCHKMIDFFKSSIQKHPEWGSFGFTFSDTSDFEDMSAFYREVENQGYVISFDKIKETYIQSQVEQGNLYLFQIYNKDFSPYSKGKPNLHTLYWKALFEEANLNNVVAKLNGEAEIFFRRHSIKASDKVVHPANQAIDNKNPHTEKTQSTFEYDLVKDKRYTQDKFFFHVPISLNFKAQGVSKFNDKVNGFLKGNPDVNIIGIDRGERHLLYFTVVNQKGEILVQESLNTLMSDKGHVNDYQQKLDKKEQERDAARKSWTTVENIKELKEGYLSHVVHKLAHLIIKYNAIVCLEDLNFGFKRGRFKVEKQVYQKFEKALIDKLNYLVFKEKELGEVGHYLTAYQLTAPFESFKKLGKQSGILFYVPADYTSKIDPTTGFVNFLDLRYQSVEKAKQLLSDFNAIRFNSVQNYFEFEIDYKKLTPKRKVGTQSKWVICTYGDVRYQNRRNQKGHWETEEVNVTEKLKALFASDSKTTTVIDYANDDNLIDVILEQDKASFFKELLWLLKLTMTLRHSKIKSEDDFILSPVKNEQGEFYDSRKAGEVWPKDADANGAYHIALKGLWNLQQINQWEKGKTLNLAIKNQDWFSFIQEKPYQE

SEQ ID NO: 407 - protein, 1251 aa, Moraxella bovoculi
MLFQDFTHLYPLSKTVRFELKPIGRTLEHIHAKNFLSQDETMADMYQKVKVILDDYHRDFIADMMGEVKLTKLAEFYDVYLKFRKNPKDDGLQKQLKDLQAVLRKESVKPIGSGGKYKTGYDRLFGAKLFKDGKELGDLAKFVIAQEGESSPKLAHLAHFEKFSTYFTGFHDNRKNMYSDEDKHTAIAYRLIHENLPRFIDNLQILTTIKQKHSALYDQIINELTASGLDVSLASHLDGYHKLLTQEGITAYNRIIGEVNGYTNKHNQICHKSERIAKLRPLHKQILSDGMGVSFLPSKFADDSEMCQAVNEFYRHYTDVFAKVQSLFDGFDDHQKDGIYVEHKNLNELSKQAFGDFALLGRVLDGYYVDVVNPEFNERFAKAKTDNAKAKLTKEKDKFIKGVHSLASLEQAIEHHTARHDDESVQAGKLGQYFKHGLAGVDNPIQKIHNNHSTIKGFLERERPAGERALPKIKSGKNPEMTQLRQLKELLDNALNVAHFAKLLTTKTTLDNQDGNFYGEFGVLYDELAKIPTLYNKVRDYLSQKPFSTEKYKLNFGNPTLLNGWDLNKEKDNFGVILQKDGCYYLALLDKAHKKVFDNAPNTGKNVYQKMVYKLLPGPNKMLPKVFFAKSNLDYYNPSAELLDKYAKGTHKKGDNFNLKDCHALIDFFKAGINKHPEWQHFGFKFSPTSSYRDLSDFYREVEPQGYQVKFVDINADYIDELVEQGKLYLFQIYNKDFSPKAHGKPNLHTLYFKALFSEDNLADPIYKLNGEAQIFYRKASLDMNETTIHRAGEVLENKNPDNPKKRQFVYDIIKDKRYTQDKFMLHVPITMNFGVQGMTIKEFNKKVNQSIQQYDEVNVIGIDRGERHLLYLTVINSKGEILEQRSLNDITTASANGTQVTTPYHKILDKREIERLNARVGWGEIETIKELKSGYLSHVVHQINQLMLKYNAIVVLEDLNFGFKRGRFKVEKQIYQNFENALIKKLNHLVLKDKADDEIGSYKNALQLTNNFTDLKSIGKQTGFLFYVPAWNTSKIDPETGFVDLLKPRYENIAQSQAFFGKFDKICYNTDKGYFEFHIDYAKFTDKAKNSRQKWAICSHGDKRYVYDKTANQNKGAAKGINVNDELKSLFARYHINDKQPNLVMDICQNNDKEFHKSLMCLLKTLLALRYSNASSDEDFILSPVANDEGVFFNSALADDTQPQNADANGAYHIALKGLWLLNELKNSDDLNKVKLAIDNQTWLNFAQNR

SEQ ID NO: 408 - protein, 1261 aa, Moraxella bovoculi
MLFQDFTHLYPLSKTVRFELKPIGKTLEHIHAKNFLNQDETMADMYQKVKAILDDYHRDFIADMMGEVKLTKLAEFYDVYLKFRKNPKDDGLQKQLKDLQAVLRKEIVKPIGNGGKYKAGYDRLFGAKLFKDGKELGDLAKFVIAQEGESSPKLAHLAHFEKFSTYFTGFHDNRKNMYSDEDKHTAIAYRLIHENLPRFIDNLQILATIKQKHSALYDQIINELTASGLDVSLASHLDGYHKLLTQEGITAYNTLLGGISGEAGSRKIQGINELINSHHNQHCHKSERIAKLRPLHKQILSDGMGVSFLPSKFADDSEVCQAVNEFYRHYADVFAKVQSLFDGFDDYQKDGIYVEYKNLNELSKQAFGDFALLGRVLDGYYVDVVNPEFNERFAKAKTDNAKAKLTKEKDKFIKGVHSLASLEQAIEHYTARHDDESVQAGKLGQYFKHGLAGVDNPIQKIHNNHSTIKGFLERERPAGERALPKIKSDKSPEIRQLKELLDNALNVAHFAKLLTTKTTLHNQDGNFYGEFGALYDELAKIATLYNKVRDYLSQKPFSTEKYKLNFGNPTLLNGWDLNKEKDNFGVILQKDGCYYLALLDKAHKKVFDNAPNTGKSVYQKMIYKLLPGPNKMLPKVFFAKSNLDYYNPSAELLDKYAQGTHKKGDNFNLKDCHALIDFFKAGINKHPEWQHFGFKFSPTSSYQDLSDFYREVEPQGYQVKFVDINADYINELVEQGQLYLFQIYNKDFSPKAHGKPNLHTLYFKALFSEDNLVNPIYKLNGEAEIFYRKASLDMNETTIHRAGEVLENKNPDNPKKRQFVYDIIKDKRYTQDKFMLHVPITMNFGVQGMTIKEFNKKVNQSIQQYDEVNVIGIDRGERHLLYLTVINSKGEILEQRSLNDITTASANGTQMTTPYHKILDKREIERLNARVGWGEIETIKELKSGYLSHVVHQISQLMLKYNAIVVLEDLNFGFKRGRFKVEKQIYQNFENALIKKLNHLVLKDKADDEIGSYKNALQLTNNFTDLKSIGKQTGFLFYVPAWNTSKIDPETGFVDLLKPRYENIAQSQAFFGKFDKICYNADRGYFEFHIDYAKFNDKAKNSRQIWKICSHGDKRYVYDKTANQNKGATIGVNVNDELKSLFTRYHINDKQPNLVMDICQNNDKEFHKSLMYLLKTLLALRYSNASSDEDFILSPVANDEGVFFNSALADDTQPQNADANGAYHIALKGLWLLNELKNSDDLNKVKLAIDNQTWLNFAQNR

SEQ ID NO: 409 - protein, 1206 aa, Butyrivibrio sp. NC3005
MYYQNLTKKYPVSKTIRNELIPIGKTLENIRKNNILESDVKRKQDYEHVKGIMDEYHKQLINEALDNYMLPSLNQAAEIYLKKHVDVEDREEFKKTQDLLRREVTGRLKEHENYTKIGKKDILDLLEKLPSISEEDYNALESFRNFYTYFTSYNKVRENLYSDEEKSSTVAYRLINENLPKFLDNIKSYAFVKAAGVLADCIEEEEQDALFMVETFNMTLTQEGIDMYNYQIGKVNSAINLYNQKNHKVEEFKKIPKMKVLYKQILSDREEVFIGEFKDDETLLSSIGAYGNVLMTYLKSEKINIFFDALRESEGKNVYVKNDLSKTTMSNIVFGSWSAFDELLNQEYDLANENKKKDDKYFEKRQKELKKNKSYTLEQMSNLSKEDISPIENYIERISEDIEKICIYNGEFEKIVVNEHDSSRKLSKNIKAVKVIKDYLDSIKELEHDIKLINGSGQELEKNLVVYVGQEEALEQLRPVDSLYNLTRNYLTKKPFSTEKVKLNFNKSTLLNGWDKNKETDNLGILFFKDGKYYLGIMNTTANKAFVNPPAAKTENVFKKVDYKLLPGSNKMLPKVFFAKSNIGYYNPSTELYSNYKKGTHKKGPSFSIDDCHNLIDFFKESIKKHEDWSKFGFEFSDTADYRDISEFYREVEKQGYKLTFTDIDESYINDLIEKNELYLFQIYNKDFSEYSKGKLNLHTLYFMMLFDQRNLDNVVYKLNGEAEVFYRPASIAENELVIHKAGEGIKNKNPNRAKVKETSTFSYDIVKDKRYSKYKFTLHIPITMNFGVDEVRRFNDVINNALRTDDNVNVIGIDRGERNLLYVVVINSEGKILEQISLNSIINKEYDIETNYHALLDEREDDRNKARKDWNTIENIKELKTGYLSQVVNVVAKLVLKYNAIICLEDLNFGFKRGRQKVEKQVYQKFEKMLIEKLNYLVIDKSREQVSPEKMGGALNALQLTSKFKSFAELGKQSGIIYYVPAYLTSKIDPTTGFVNLFYIKYENIEKAKQFFDGFDFIRFNKKDDMFEFSFDYKSFTQKACGIRSKWIVYTNGERIIKYPNPEKNNLFDEKVINVTDEIKGLFKQYRIPYENGEDIKEIIISKAEADFYKRLFRLLHQTLQMRNSTSDGTRDYIISPVKNDRGEFFCSEFSEGTMPKDADANGAYNIARKGLWVLEQIRQKDEGEKVNLSMTNAEWLKYAQLHLL

SEQ ID NO: 410 - protein, 1262 aa, Eubacterium rectale
MNNGTNNFQNFIGISSLQKTLRNALIPTETTQQFIVKNGIIKEDELRGENRQILKDIMDDYYRGFISETLSSIDDIDWTSLFEKMEIQLKNGDNKDTLIKEQTEYRKAIHKKFANDDRFKNMFSAKLISDILPEFVIHNNNYSASEKEEKTQVIKLFSRFATSFKDYFKNRANCFSADDISSSSCHRIVNDNAEIFFSNALVYRRIVKSLSNDDINKISGDMKDSLKEMSLEEIYSYEKYGEFITQEGISFYNDICGKVNSFMNLYCQKNKENKNLYKLQKLHKQILCIADTSYEVPYKFESDEEVYQSVNGFLDNISSKHIVERLRKIGDNYNGYNLDKIYIVSKFYESVSQKTYRDWETINTALEIHYNNILPGNGKSKADKVKKAVKNDLQKSITEINELVSNYKLCSDDNIKAETYIHEISHILNNFEAQELKYNPEIHLVESELKASELKNVLDVIMNAFHWCSVFMTEELVDKDNNFYAELEEIYDEIYPVISLYNLVRNYVTQKPYSTKKIKLNFGIPTLADGWSKSKEYSNNAIILMRDNLYYLGIFNAKNKPDKKIIEGNTSENKGDYKKMIYNLLPGPNKMIPKVFLSSKTGVETYKPSAYILEGYKQNKHIKSSKDFDITFCHDLIDYFKNCIAIHPEWKNFGFDFSDTSTYEDISGFYREVELQGYKIDWTYISEKDIDLLQEKGQLYLFQIYNKDFSKKSTGNDNLHTMYLKNLFSEENLKDIVLKLNGEAEIFFRKSSIKNPIIHKKGSILVNRTYEAEEKDQFGNQIVRKNIPENIYQELYKYFNDKSDKELSDEAAKLKNVVGHHEAATNIVKDYRYTYDKYFLHMPITINFKANKTGFINDRILQYIAKEKDLHVIGIDRGERNLIYVSVIDTCGNIVEQKSFNIVNGYDYQIKLKQQEGARQIARKEWKEIGKIKEIKEGYLSLVIHEISKMVIKYNAIIAMEDLSYGFKKGRFKVERQVYQKFETMLINKLNYLVFKDISITENGGLLKGYQLTYIPDKLKNVGHQCGCIFYVPAAYTSKIDPTTGFVNIFKFKDLTVDAKREFIKKFDSIRYDSEKNLFCFTFDYNNFITQNTVMSKSSWSVYTYGVRIKRRFVNGRFSNESDTIDITKDMEKTLEMTDINWRDGHDLRQDIIDYEIVQHIFEIFRLTVQMRNSLSELEDRDYDRLISPVLNENNIFYDSAKAGDALPKDADANGAYCIALKGLYEIKQITENWKEDGKFSRDKLKISNKDWFDFIQNKRYL

SEQ ID NO: 411 - protein, 1263 aa, Eubacterium rectale
MNNGTNNFQNFIGISSLQKTLRNALIPTETTQQFIVKNGIIKEDELRGENRQILKDIMDDYYRGFISETLSSIDDIDWTSLFEKMEIQLKNGDNKDTLIKEQAEKRKAIYKKFADDDRFKNMFSAKLISDILPEFVIHNNNYSASEKEEKTQVIKLFSRFATSFKDYFKNRANCFSADDISSSSCHRIVNDNAEIFFSNALVYRRIVKNLSNDDINKISGDMKDSLKEMSLDEIYSYEKYGEFITQEGISFYNDICGKVNSFMNLYCQKNKENKNLYKLRKLHKQILCIADTSYEVPYKFESDEEVYQSVNGFLDNISSKHIVERLRKIGDNYNGYNLDKIYIVSRFYESVSQKTYRDWETINTALEIHYNNILPGNGKSKADKVKKAVKNDLQKSITEINELVSNYKLCPDDNIKAETYIHEISHILNNFEAQELKYNPEIHLVESELKASELKNVLDVIMNAFHWCSVFMTEELVDKDNNFYAELEEIYDEIYPVISLYNLVRNYVTQKPYSTKKIKLNFGIPTLADGWSKSKEYSNNAIILMRDNLYYLGIFNAKNKPDKKIIEGNTSENKGDYKKMIYNLLPGPNKMIPKVFLSSKTGVETYKPSAYILEGYKQNKHLKSSKDFDITFCRDLIDYFKNCIAIHPEWKNFGFDFSDTSTYEDISGFYREVELQGYKIDWTYISEKDIDLLQEKGQLYLFQIYNKDFSKKSTGNDNLHTMYLKNLFSEENLKDIVLKLNGEAEIFFRKSSIKNPIIHKKGSILVNRTYEAEEKDQFGNIQIVRKTIPENIYQELYKYFNDKSDKELSDEAAKLKNVVGHHEAATNIVKDYRYTYDKYFLHMPITINFKANKTSFINDRILQYIAKENDLHVIGIDRGERNLIYVSVIDTCGNIVEQKSFNIVNGYDYQIKLKQQEGARQIARKEWKEIGKIKEIKEGYLSLVIHEISKMVIKYNAIIAMEDLSYGFKKGRFKVERQVYQKFETMLINKLNYLVFKDISITENGGLLKGYQLTYIPEKLKNVGHQCGCIFYVPAAYTSKIDPTTGFANIFKFKDLTVDAKREFIKKFDSIRYDSEKNLFCFTFDYNNFITQNTVMSKSSWSVYTYGVRIKRRFVNGRFSNESDTIDITKDMEKTLEMTDINWRDGHDLRQDIIDYEIVQHIFEIFKLTVQMRNSLSELEDRDYDRLISPVLNENNIFYDSAKAGDALPKDADANGAYCIALKGLYEIKQITENWKEDGKFSRDKLKISNKDWFDFIQNKRYL

SEQ ID NO: 412 - protein, 1263 aa, Eubacterium rectale
MNNGTNNFQNFIGISSLQKTLRNALTPTETTQQFIVKNGIIKEDELRGENRQILKDIMDDYYRGFISETLSSIDDIDWTSLFEKMEIQLKNGDNKDTLIKEQAEKRKAIYKKFADDDRFKNMFSAKLISDILPEFVIHNNNYSASEKEEKTQVIKLFSRFATSFKDYFKNRANCFSADDISSSSCHRIVNDNAEIFFSNALVYRRIVKNLSNDDINKISGDMKDSLKKMSLEKIYSYEKYGEFITQEGISFYNDICGKVNSFMNLYCQKNKENKNLYKLRKLHKQILCIADTSYEVPYKFESDEEVYQSVNGFLDNISSKHIVERLRKIGDNYNGYNLDKIYIVSKFYESVSQKTYRDWETINTALEIHYNNILPGNGKSKADKVKKAVKNDLQKSITEINELVSNYKLCPDDNIKAETYIHEISHILNNFEAQELKYNPEIHLVESELKASELKNVLDVIMNAFHWCSVFMTEELVDKDNNFYAELEEIYDEIYPVISLYNLVRNYVTQKPYSTKKIKLNFGIPTLADGWSKSKEYSNNAIILMRDNLYYLGIFNAKNKPEKKIIEGNTSENKGDYKKMIYNLLPGPNKMIPKVFLSSKTGVETYKPSAYILEGYKQNKHLKSSKDFDITFCRDLIDYFKNCIAIHPEWKNFGFDFSDTSTYEDISGFYREVELQGYKIDWTYISEKDIDLLQEKGQLYLFQIYNKDFSKKSTGNDNLHTMYLKNLFSEENLKDVVLKLNGEAEIFFRKSSIKNPIIHKKGSILVNRTYEAEEKDQFGNIQIVRKTIPENIYQELYKYFNDKSDKELSDEAAKLKNAVGHHEAATNIVKDYRYTYDKYFLHMPITINFKANKTSFINDRILQYIAKEKDLHVIGIDRGERNLIYVSVIDTCGNIVEQKSFNIVNGYDYQIKLKQQEGARQIARKEWKEIGKIKEIKEGYLSLVIHEISKMVIKYNAIIAMEDLSYGFKKGRFKVERQVYQKFETMLINKLNYLVFKDISITENGGLLKGYQLTYIPEKLKNVGHQCGCIFYVPAAYTSKIDPTTGFVNIFKFKDLTVDAKREFIKKFDSIRYDSDKNLFCFTFDYNNFITQNTVMSKSSWSVYTYGVRIKRRFVNGRFSNESDTIDITKDMEKTLEMTDINWRDGHDLRQDIIDYEIVQHIFEIFKLTVQMRNSLSELEDRNYDRLISPVLNENNIFYDSAKAGDALPKDADANGAYCIALKGLYEIKQITENWKEDGKFSRDKLKISNKDWFDFIQNKRYL

SEQ ID NO: 413 - protein, 1263 aa, Eubacterium sp. 41_20
MNNGTNNFQNFIGISSLQKTLRNALIPTETTQQFIVKNGIIKEDELRGKNRQILKDIMDDYYRGFISETLSSIDDIDWTSLFEKMEIQLKNGDNKDTLIKEQAEKRKAIYKKFADDDRFKNMFSAKLISDILPEFVIHNNNYSASEKKEKTQVIKLFSRFATSFKDYFKNRANCFSADDISSSSCHRIVNDNAEIFFSNALVYRRIVKNLSNDDINKISGDMKDSLKEMSLEEIYSYEKYGEFITQEGISFYNDICGKVNSFMNLYCQKNKENKNLYKLRKLHKQILCIADTSYEVPYKFESDEEVYQSVNGFLDNISSKHIVERLRKIGDNYNDYNLDKIYIVSKFYESVSQKTYRDWETINTALEIHYNNILPGNGKSKADKVKKAVKNDLQKSITEINELVSNYKLCSDDNIKAETYIHEISHILNNFEAHELKYNPEIHLVESELKASELKNVLDIIMNAFHWCSVFMTEELVDKDNNFYAELEEIYDEIYPVISLYNLVRNYVTQKPYSTKKIKLNFGIPTLADGWSKSKEYSNNAIILMRDNLYYLGIFNAKNKPDKKIIEGNTSENKGDYKKMIYNLLPGPNKMIPKVFLSSKTGVETYKPSAYILEGYKQNKHLKSSKDFDITFCHDLIDYFKNCIAIHPEWKNFGFDFSDTSAYEDISGFYREVELQGYKIDWTYISEKDIDLLQEKGQLYLFQIYNKDFSKKSTGNDNLHTMYLKNLFSEENLKDIVLKLNGEAEIFFRKSSIKNPIIHKKGSILVNRTYEAEEKDQFGNIQIVRKTIPENIYQELYKYFNDKSDKELSDEAAKLKNVVGHHEAATNIVKDYRYTYDKYFLHMPITINFKANKTSFINDRILQYIAKEKDLHVIGIDRGERNLIYVSVIDTCGNIVEQKSFNIVNGYDYQIKLKQQEGARQIARKEWKEIGKIKEIKEGYLSLVIHEISKMVIKYNAIIAMEDLSYGFKKGRFKVERQVYQKFETMLINKLNYLVFKDISITENGGLLKGYQLTYIPDKLKNVGHQCGCIFYVPAAYTSKIDPTTGFVNIFKFKDLTVDAKREFIKKFDSIRYDSEKNLFCFTFDYNNFITQNTVMSKSSWSVYTYGVRIKRRFVNGRFSNESDTIDITKDMEKTLEMTDINWRDGHDLRQDIIDYEIVQHIFEIFKLTVQMRNSLSELEDRDYDRLISPVLNENNIFYDSAKAGYALPKDADANGAYCIALKGLYEIKQITENWKEDGKFSRDKLKISNKDWFDFIQNKRYL

SEQ ID NO: 414-595 - skipped (182 entries)

SEQ ID NO: 596 - protein, 9 aa, Artificial Sequence
  Synthetic Polypeptide
GGSGGSGGS

SEQ ID NO: 597 - protein, 21 aa, Artificial Sequence
  Synthetic Polypeptide
GGSGGSGGSGGSGGSGGSGGS

SEQ ID NO: 598 - protein, 36 aa, Artificial Sequence
  Synthetic Polypeptide
  VARIANT (2)..(2): Xaa can be any naturally occurring amino acid
  VARIANT (4)..(26): Xaa can be any naturally occurring amino acid
  VARIANT (27)..(29): Xaa may be absent
  VARIANT (32)..(33): Xaa can be any naturally occurring amino acid
  VARIANT (34)..(35): Xaa may be absent
HXEXXXXXXXXXXXXXXXXXXXXXXXXXXPCXXXXC

SEQ ID NO: 599 - protein, 11 aa, Artificial Sequence
  Synthetic Polypeptide
SPKKKRKVEAS

SEQ ID NO: 600-606 - skipped (7 entries)

SEQ ID NO: 607 - protein, 200 aa, Homo sapiens
MDSLLMNRRKFLYQFKNVRWAKGRRETYLCYVVKRRDSATSFSLDFGYLRNKNGCHVELLFLRYISDWDLDPGRCYRVTWFTSWSPCYDCARHVADFLRGNPYLSLRIFTARLYFCEDRKAEPEGLRRLHRAGVQIAIMTFKDYFYCWNTFVENHERTFKAWEGLHENSVRLSRQLRRILLPLYEVDDLRDAFRTLGLLD

SEQ ID NO: 608 - protein, 181 aa, Homo sapiens
MDSLLMNRRKFLYQFKNVRWAKGRRETYLCYVVKRRDSATSFSLDFGYLRNKNGCHVELLFLRYISDWDLDPGRCYRVTWFTSWSPCYDCARHVADFLRGNPNLSLRIFTARLYFCEDRKAEPEGLRRLHRAGVQIAIMTFKDYFYCWNTFVENHERTFKAWEGLHENSVRLSRQLRRILL

SEQ ID NO: 609 - protein, 208 aa, Petromyzon marinus
MTDAEYVRIHEKLDIYTFKKQFFNNKKSVSHRCYVLFELKRRGERRACFWGYAVNKPQSGTERGIHAEIFSIRKVEEYLRDNPGQFTINWYSSWSPCADCAEKILEWYNQELRGNGHTLKIWACKLYYEKNARNQIGLWNLRDNGVGLNVMVSEHYQCCRKIFIQSSHNQLNENRWLEKTLKRAEKRRSELSIMIQVKILHTTKSPAV

SEQ ID NO: 610 - protein, 325 aa, Homo sapiens
MELKYHPEMRFFHWFSKWRKLHRDQEYEVTWYISWSPCTKCTRDMATFLAEDPKVTLTIFVARLYYFWDPDYQEALRSLCQKRDGPRATMKIMNYDEFQHCWSKFVYSQRELFEPWNNLPKYYILLHIMLGEILRHSMDPPTFTFNFNNEPWVRGRHETYLCYEVERMHNDTWVLLNQRRGFLCNQAPHKHGFLEGRHAELCFLDVIPFWKLDLDQDYRVTCFTSWSPCFSCAQEMAKFISKNKHVSLCIFTARIYDDQGRCQEGLRTLAEAGAKISIMTYSEFKHCWDTFVDHQGCPFQPWDGLDEHSQDLSGRLRAILQNQEN

SEQ ID NO: 611-673 - skipped (63 entries)

SEQ ID NO: 674 - protein, 1368 aa, Artificial Sequence; identical to SEQ ID NO: 4
  Synthetic Polypeptide

SEQ ID NO: 675-740 - skipped (66 entries)

SEQ ID NO: 741 - protein, 7 aa, Artificial Sequence
  Synthetic Polypeptide
PKKKRKV

SEQ ID NO: 742 - protein, 30 aa, Artificial Sequence
  Synthetic Polypeptide
MDSLLMNRRKFLYQFKNVRWAKGRRETYLC

SEQ ID NO: 743-746 - skipped (4 entries)

SEQ ID NO: 747 - DNA, 23 bp, Artificial Sequence
  Synthetic Polynucleotide
tttytttttttttttttttgagg

SEQ ID NO: 748 - DNA, 23 bp, Artificial Sequence
  Synthetic Polynucleotide
tttgyggtggagaggggcttcgg

SEQ ID NO: 749 - DNA, 23 bp, Artificial Sequence
  Synthetic Polynucleotide
ttgyggtggagaggggcttcggg

SEQ ID NO: 750 - DNA, 23 bp, Artificial Sequence
  Synthetic Polynucleotide
ttgytaataaaagttagaaacgg

SEQ ID NO: 751 - DNA, 23 bp, Artificial Sequence
  Synthetic Polynucleotide
ttgayagggagcaagcagttcgg

SEQ ID NO: 752 - DNA, 23 bp, Artificial Sequence
  Synthetic Polynucleotide
tgayagggagcaagcagttcggg

SEQ ID NO: 753 - DNA, 23 bp, Artificial Sequence
  Synthetic Polynucleotide
ttcygtaaaacataaaagtcagg

SEQ ID NO: 754 - DNA, 23 bp, Artificial Sequence
  Synthetic Polynucleotide
ttcyggtttgtcttatattctgg

SEQ ID NO: 755 - DNA, 23 bp, Artificial Sequence
  Synthetic Polynucleotide
cttcyatgatcttcgaggagagg

SEQ ID NO: 756 - DNA, 23 bp, Artificial Sequence
  Synthetic Polynucleotide
ttcgtggyggaagctcctcacgg

SEQ ID NO: 757 - DNA, 23 bp, Artificial Sequence
  Synthetic Polynucleotide
cttcaytgtggtcattttcctgg

SEQ ID NO: 758 - DNA, 23 bp, Artificial Sequence
  Synthetic Polynucleotide
ttcaytgtggtcattttcctggg

SEQ ID NO: 759 - DNA, 23 bp, Artificial Sequence
  Synthetic Polynucleotide
ttcagygtattgctttgaggagg

SEQ ID NO: 760 - DNA, 23 bp, Artificial Sequence
  Synthetic Polynucleotide
ttaagttytatgcgattaccggg

SEQ ID NO: 761 - DNA, 23 bp, Artificial Sequence
  Synthetic Polynucleotide
tgtgttygcgcagggagctcggg

SEQ ID NO: 762 - DNA, 23 bp, Artificial Sequence
  Synthetic Polynucleotide
atgtgttygcgcagggagctcgg

SEQ ID NO: 763 - DNA, 23 bp, Artificial Sequence
  Synthetic Polynucleotide
tgtggyggccatggcctatgagg

SEQ ID NO: 764 - DNA, 23 bp, Artificial Sequence
  Synthetic Polynucleotide
tgtgayggacagagcacaaatgg

SEQ ID NO: 765 - DNA, 23 bp, Artificial Sequence
  Synthetic Polynucleotide
tgtagyaggtgaagatgatcagg

SEQ ID NO: 766 - DNA, 23 bp, Artificial Sequence
  Synthetic Polynucleotide
tgtaatayttctgatcatgttgg

SEQ ID NO: 767 - DNA, 23 bp, Artificial Sequence
  Synthetic Polynucleotide
tggyagaggcccctggggtcagg

SEQ ID NO: 768 - DNA, 23 bp, Artificial Sequence
  Synthetic Polynucleotide
tggyaagttctcccctcaacagg

SEQ ID NO: 769 - DNA, 23 bp, Artificial Sequence
  Synthetic Polynucleotide
tggttyggcatcatagtgctggg

SEQ ID NO: 770 - DNA, 23 bp, Artificial Sequence
  Synthetic Polynucleotide
gtggttyggcatcatagtgctgg

SEQ ID NO: 771 - DNA, 23 bp, Artificial Sequence
  Synthetic Polynucleotide
tggggaayatacgtgcttggcgg

SEQ ID NO: 772 - DNA, 23 bp, Artificial Sequence
  Synthetic Polynucleotide
ggggaayatacgtgcttggcggg

SEQ ID NO: 773 - DNA, 23 bp, Artificial Sequence
  Synthetic Polynucleotide
gagtygcaccaaaatttttgggg

SEQ ID NO: 774 - DNA, 23 bp, Artificial Sequence
  Synthetic Polynucleotide
ggagtygcaccaaaatttttggg

SEQ ID NO: 775 - DNA, 23 bp, Artificial Sequence
  Synthetic Polynucleotide
tggagtygcaccaaaatttttgg

SEQ ID NO: 776 - DNA, 23 bp, Artificial Sequence
  Synthetic Polynucleotide
tggaagytatcgatgaccacagg

SEQ ID NO: 777 - DNA, 23 bp, Artificial Sequence
  Synthetic Polynucleotide
tgcyggtggccgacgtgaagcgg

SEQ ID NO: 778 - DNA, 23 bp, Artificial Sequence
  Synthetic Polynucleotide
tgcyaaaagacccaaaacaaagg

SEQ ID NO: 779 - DNA, 23 bp, Artificial Sequence
  Synthetic Polynucleotide
tgctygatccactggatgtgggg

SEQ ID NO: 780 - DNA, 23 bp, Artificial Sequence
  Synthetic Polynucleotide
gtgctygatccactggatgtggg

SEQ ID NO: 781 - DNA, 23 bp, Artificial Sequence
  Synthetic Polynucleotide
cgtgctygatccactggatgtgg

SEQ ID NO: 782 - DNA, 23 bp, Artificial Sequence
  Synthetic Polynucleotide
tgctgaytggaaaccgtgagtgg

SEQ ID NO: 783 - DNA, 23 bp, Artificial Sequence
  Synthetic Polynucleotide
gtgcggyatttgtcctgctccgg

SEQ ID NO: 784 - DNA, 23 bp, Artificial Sequence
  Synthetic Polynucleotide
tgcggyatttgtcctgctccggg

SEQ ID NO: 785 - DNA, 23 bp, Artificial Sequence
  Synthetic Polynucleotide
tgcggagyggacgggcagcgtgg

SEQ ID NO: 786 - DNA, 23 bp, Artificial Sequence
  Synthetic Polynucleotide
gcgaytgcagaagatgacctggg

SEQ ID NO: 787 - DNA, 23 bp, Artificial Sequence
  Synthetic Polynucleotide
tgcgaytgcagaagatgacctgg

SEQ ID NO: 788 - DNA, 23 bp, Artificial Sequence
  Synthetic Polynucleotide
gcayggtctctcgggcgctgggg

SEQ ID NO: 789 - DNA, 23 bp, Artificial Sequence
  Synthetic Polynucleotide
tgcayggtctctcgggcgctggg

SEQ ID NO: 790 - DNA, 23 bp, Artificial Sequence
  Synthetic Polynucleotide
ctgcayggtctctcgggcgctgg

SEQ ID NO: 791 - DNA, 23 bp, Artificial Sequence
  Synthetic Polynucleotide
tgcagyagccgcccttctgccgg

SEQ ID NO: 792 - DNA, 23 bp, Artificial Sequence
  Synthetic Polynucleotide
tgayggaggggatggcgcctagg

SEQ ID NO: 793 - DNA, 23 bp, Artificial Sequence
  Synthetic Polynucleotide
tgatgygaggctgccgccgcagg

SEQ ID NO: 794 - DNA, 23 bp, Artificial Sequence
  Synthetic Polynucleotide
tgagyatgcataagcgacgaagg

SEQ ID NO: 795 - DNA, 23 bp, Artificial Sequence
  Synthetic Polynucleotide
tgagtytgagagccggctggcgg

SEQ ID NO: 796 - DNA, 23 bp, Artificial Sequence
  Synthetic Polynucleotide
tgagtaygcataagcgacgaagg

SEQ ID NO: 797 - DNA, 23 bp, Artificial Sequence
  Synthetic Polynucleotide
tgaggyaatcagccaggatctgg

SEQ ID NO: 798 - DNA, 23 bp, Artificial Sequence
  Synthetic Polynucleotide
tgagayggcccacctgggcttgg

SEQ ID NO: 799 - DNA, 23 bp, Artificial Sequence
  Synthetic Polynucleotide
gagayggcccacctgggcttggg

SEQ ID NO: 800 - DNA, 23 bp, Artificial Sequence
  Synthetic Polynucleotide
tctyggagggcgaggaggagagg

SEQ ID NO: 801 - DNA, 23 bp, Artificial Sequence
  Synthetic Polynucleotide
tctygatggccacgtcgtactgg

SEQ ID NO: 802 - DNA, 23 bp, Artificial Sequence
  Synthetic Polynucleotide
tctttaytgtttaagccaacagg

SEQ ID NO: 803 - DNA, 23 bp, Artificial Sequence
  Synthetic Polynucleotide
tctgyggaccaaaatcattctgg

SEQ ID NO: 804 - DNA, 23 bp, Artificial Sequence
  Synthetic Polynucleotide
tctggytgatactcaagtccagg

SEQ ID NO: 805 - DNA, 23 bp, Artificial Sequence
  Synthetic Polynucleotide
tccyagtaagaaacagaatatgg

SEQ ID NO: 806 - DNA, 23 bp, Artificial Sequence
  Synthetic Polynucleotide
tccyaaaaggcacgggatgaagg

SEQ ID NO: 807 - DNA, 23 bp, Artificial Sequence
  Synthetic Polynucleotide
tccaytgtggcccaggaaggagg

SEQ ID NO: 808 - DNA, 23 bp, Artificial Sequence
  Synthetic Polynucleotide
cgctccaytgtggcccaggaagg

SEQ ID NO: 809 - DNA, 23 bp, Artificial Sequence
  Synthetic Polynucleotide
tccayggtcaagtcagcctcagg

SEQ ID NO: 810 - DNA, 23 bp, Artificial Sequence
  Synthetic Polynucleotide
ccayggtcaagtcagcctcaggg

SEQ ID NO: 811 - DNA, 23 bp, Artificial Sequence
  Synthetic Polynucleotide
ctccayggagttccctggcctgg

SEQ ID NO: 812 - DNA, 23 bp, Artificial Sequence
  Synthetic Polynucleotide
tccayggagttccctggcctggg

SEQ ID NO: 813 - DNA, 23 bp, Artificial Sequence
  Synthetic Polynucleotide
ccayggagttccctggcctgggg

SEQ ID NO: 814 - DNA, 23 bp, Artificial Sequence
  Synthetic Polynucleotide
tccayagatgaagttattgcagg

SEQ ID NO: 815 - DNA, 23 bp, Artificial Sequence
  Synthetic Polynucleotide
ctccagyaagttataaaatttgg

SEQ ID NO: 816 - DNA, 23 bp, Artificial Sequence
  Synthetic Polynucleotide
tccagyaagttataaaatttggg

SEQ ID NO: 817 - DNA, 23 bp, Artificial Sequence
  Synthetic Polynucleotide
tccaggygcgggcgtcatgctgg

SEQ ID NO: 818 - DNA, 23 bp, Artificial Sequence
  Synthetic Polynucleotide
ccaggygcgggcgtcatgctggg

SEQ ID NO: 819 - DNA, 23 bp, Artificial Sequence
  Synthetic Polynucleotide
tcaytgataagcagggcccaggg

SEQ ID NO: 820 - DNA, 23 bp, Artificial Sequence
  Synthetic Polynucleotide
ttcaytgataagcagggcccagg

SEQ ID NO: 821 - DNA, 23 bp, Artificial Sequence
  Synthetic Polynucleotide
tcayggtgagttaaggacagtgg

SEQ ID NO: 822 - DNA, 23 bp, Artificial Sequence
  Synthetic Polynucleotide
tcatattyacaggcttgtaaagg

SEQ ID NO: 823 - DNA, 23 bp, Artificial Sequence
  Synthetic Polynucleotide
catagtyctgcagaggagagggg

SEQ ID NO: 824 - DNA, 23 bp, Artificial Sequence
  Synthetic Polynucleotide
tcatagtyctgcagaggagaggg

SEQ ID NO: 825 - DNA, 23 bp, Artificial Sequence
  Synthetic Polynucleotide
tcagaagyttttttcttcgcagg

SEQ ID NO: 826 - DNA, 23 bp, Artificial Sequence
  Synthetic Polynucleotide
tcaagtgygtccttccggagcgg

SEQ ID NO: 827 - DNA, 23 bp, Artificial Sequence
  Synthetic Polynucleotide
caagtgygtccttccggagcggg

SEQ ID NO: 828 - DNA, 23 bp, Artificial Sequence
  Synthetic Polynucleotide
aagtgygtccttccggagcgggg

SEQ ID NO: 829 - DNA, 23 bp, Artificial Sequence
  Synthetic Polynucleotide
agtgygtccttccggagcggggg

SEQ ID NO: 830 - DNA, 23 bp, Artificial Sequence
  Synthetic Polynucleotide
tacygtgggcagagaaggggagg

SEQ ID NO: 831 - DNA, 23 bp, Artificial Sequence
  Synthetic Polynucleotide
aggtacygtgggcagagaagggg

SEQ ID NO: 832 - DNA, 23 bp, Artificial Sequence
  Synthetic Polynucleotide
caggtacygtgggcagagaaggg

SEQ ID NO: 833 - DNA, 23 bp, Artificial Sequence
  Synthetic Polynucleotide
taaytgtgcccatggccatttgg

SEQ ID NO: 834 - DNA, 23 bp, Artificial Sequence
  Synthetic Polynucleotide
taaatgaytgagtttgcccttgg

SEQ ID NO: 835 - DNA, 23 bp, Artificial Sequence
  Synthetic Polynucleotide
gttataygtgccaatgtgactgg

SEQ ID NO: 836 - DNA, 23 bp, Artificial Sequence
  Synthetic Polynucleotide
gtgtgtayagatgtccagaaggg

SEQ ID NO: 837 - DNA, 23 bp, Artificial Sequence
  Synthetic Polynucleotide
gtcytaggccccaaaaattttgg

SEQ ID NO: 838 - DNA, 23 bp, Artificial Sequence
  Synthetic Polynucleotide
gtcgagaygctggccagctacgg

SEQ ID NO: 839 - DNA, 23 bp, Artificial Sequence
  Synthetic Polynucleotide
tcgagaygctggccagctacggg

SEQ ID NO: 840 - DNA, 23 bp, Artificial Sequence
  Synthetic Polynucleotide
gtcaytgaggttctgcatggtgg

SEQ ID NO: 841 - DNA, 23 bp, Artificial Sequence
  Synthetic Polynucleotide
gcggtcaytgaggttctgcatgg

SEQ ID NO: 842 - DNA, 23 bp, Artificial Sequence
  Synthetic Polynucleotide
gtcaygaaaaagccaagatgcgg

SEQ ID NO: 843 - DNA, 23 bp, Artificial Sequence
  Synthetic Polynucleotide
tcaygaaaaagccaagatgcggg

SEQ ID NO: 844 - DNA, 23 bp, Artificial Sequence
  Synthetic Polynucleotide
gtcayagttctggcacgttttgg

SEQ ID NO: 845 - DNA, 23 bp, Artificial Sequence
  Synthetic Polynucleotide
gtayagaggtattgttcttttgg

SEQ ID NO: 846 - DNA, 23 bp, Artificial Sequence
  Synthetic Polynucleotide
gtagyaggcccaagcccgacagg

SEQ ID NO: 847 - DNA, 23 bp, Artificial Sequence
  Synthetic Polynucleotide
gtaagtgytgaccaaattaccgg

SEQ ID NO: 848 - DNA, 23 bp, Artificial Sequence
  Synthetic Polynucleotide
ggtygggagggaaaagacattgg

SEQ ID NO: 849 - DNA, 23 bp, Artificial Sequence
  Synthetic Polynucleotide
ggttayggtgccgttaagtttgg

SEQ ID NO: 850 - DNA, 23 bp, Artificial Sequence
  Synthetic Polynucleotide
ggtgttgytggaatggagaatgg

SEQ ID NO: 851 - DNA, 23 bp, Artificial Sequence
  Synthetic Polynucleotide
gggattgytgttcatgaattggg

SEQ ID NO: 852 - DNA, 23 bp, Artificial Sequence
  Synthetic Polynucleotide
ggcyatatacaactacgcaaagg

SEQ ID NO: 853 - DNA, 23 bp, Artificial Sequence
  Synthetic Polynucleotide
gggcyagaaatctgttgctatgg

SEQ ID NO: 854 - DNA, 23 bp, Artificial Sequence
  Synthetic Polynucleotide
ggcyagaaatctgttgctatggg

SEQ ID NO: 855 - DNA, 23 bp, Artificial Sequence
  Synthetic Polynucleotide
ggctgytgttggccagcagaagg

SEQ ID NO: 856 - DNA, 23 bp, Artificial Sequence
  Synthetic Polynucleotide
ggctgatyacctcacgctccagg

SEQ ID NO: 857 - DNA, 23 bp, Artificial Sequence
  Synthetic Polynucleotide
gatyacctcacgctccaggttgg

SEQ ID NO: 858 - DNA, 23 bp, Artificial Sequence
  Synthetic Polynucleotide
ggcatagyggaagatctatgagg

SEQ ID NO: 859 - DNA, 23 bp, Artificial Sequence
  Synthetic Polynucleotide
ggcaagygcatcaacacgctggg

SEQ ID NO: 860 - DNA, 23 bp, Artificial Sequence
  Synthetic Polynucleotide
gggcaagygcatcaacacgctgg

SEQ ID NO: 861 - DNA, 23 bp, Artificial Sequence
  Synthetic Polynucleotide
ggataayatcaaacacgtcccgg

SEQ ID NO: 862 - DNA, 23 bp, Artificial Sequence
  Synthetic Polynucleotide
gataayatcaaacacgtcccggg

SEQ ID NO: 863 - DNA, 23 bp, Artificial Sequence
  Synthetic Polynucleotide
ggagyaggggctcagcagggcgg

SEQ ID NO: 864 - DNA, 23 bp, Artificial Sequence
  Synthetic Polynucleotide
ataggagyaggggctcagcaggg

SEQ ID NO: 865 - DNA, 23 bp, Artificial Sequence
  Synthetic Polynucleotide
ggaggyaataactttgtaagtgg

SEQ ID NO: 866 - DNA, 23 bp, Artificial Sequence
  Synthetic Polynucleotide
ggagayggcctccatgaaggagg

SEQ ID NO: 867 - DNA, 23 bp, Artificial Sequence
  Synthetic Polynucleotide
ggaagyggcgtgctgtgctgagg

SEQ ID NO: 868 - DNA, 23 bp, Artificial Sequence
  Synthetic Polynucleotide
ggaagyagtggtggaagtagagg

SEQ ID NO: 869 - DNA, 23 bp, Artificial Sequence
  Synthetic Polynucleotide
gcttttyttcaagctgcccaagg

SEQ ID NO: 870 - DNA, 23 bp, Artificial Sequence
  Synthetic Polynucleotide
gcttgyagatggccatggcgcgg

SEQ ID NO: 871 - DNA, 23 bp, Artificial Sequence
  Synthetic Polynucleotide
gctgtyggccgccggctccgcgg

SEQ ID NO: 872 - DNA, 23 bp, Artificial Sequence
  Synthetic Polynucleotide
cggytggccttgggattgagggg

SEQ ID NO: 873 - DNA, 23 bp, Artificial Sequence
  Synthetic Polynucleotide
gcggytggccttgggattgaggg

SEQ ID NO: 874 - DNA, 23 bp, Artificial Sequence
  Synthetic Polynucleotide
cgcggytggccttgggattgagg

SEQ ID NO: 875 - DNA, 23 bp, Artificial Sequence
  Synthetic Polynucleotide
gccyggggaaaaacagagtcagg

SEQ ID NO: 876 - DNA, 23 bp, Artificial Sequence
  Synthetic Polynucleotide
gccygaaaacacagccacagagg

SEQ ID NO: 877 - DNA, 23 bp, Artificial Sequence
  Synthetic Polynucleotide
gccgggygttggtctgtctctgg

SEQ ID NO: 878 - DNA, 23 bp, Artificial Sequence
  Synthetic Polynucleotide
gccaggyggaagtcatagagcgg

SEQ ID NO: 879 - DNA, 23 bp, Artificial Sequence
  Synthetic Polynucleotide
gccagayactttgtgaagtaagg

SEQ ID NO: 880 - DNA, 23 bp, Artificial Sequence
  Synthetic Polynucleotide
ccagayactttgtgaagtaaggg

SEQ ID NO: 881 - DNA, 23 bp, Artificial Sequence
  Synthetic Polynucleotide
gccagagygagtggctggagtgg

SEQ ID NO: 882 - DNA, 23 bp, Artificial Sequence
  Synthetic Polynucleotide
gccaayggtaacgggcctttggg

SEQ ID NO: 883 - DNA, 23 bp, Artificial Sequence
  Synthetic Polynucleotide
agccaayggtaacgggcctttgg

SEQ ID NO: 884 - DNA, 23 bp, Artificial Sequence
  Synthetic Polynucleotide
gcatgyttgctccaacacagagg

SEQ ID NO: 885 - DNA, 23 bp, Artificial Sequence
  Synthetic Polynucleotide
caagcagygtgagctgctcctgg

SEQ ID NO: 886 - DNA, 23 bp, Artificial Sequence
  Synthetic Polynucleotide
gcagygtgagctgctcctggagg

SEQ ID NO: 887 - DNA, 23 bp, Artificial Sequence
  Synthetic Polynucleotide
gcagtggyaggtgatgttctggg

SEQ ID NO: 888 - DNA, 23 bp, Artificial Sequence
  Synthetic Polynucleotide
gcaggyagagatgaccgctgtgg

SEQ ID NO: 889 - DNA, 23 bp, Artificial Sequence
  Synthetic Polynucleotide
gcaggtyaccatctcctggaggg

SEQ ID NO: 890 - DNA, 23 bp, Artificial Sequence
  Synthetic Polynucleotide
tgcaggtyaccatctcctggagg

SEQ ID NO: 891 - DNA, 23 bp, Artificial Sequence
  Synthetic Polynucleotide
gcaaataygctatctgtagcagg

SEQ ID NO: 892 - DNA, 23 bp, Artificial Sequence
  Synthetic Polynucleotide
gattayatctgtagccttcgggg

SEQ ID NO: 893 - DNA, 23 bp, Artificial Sequence
  Synthetic Polynucleotide
agattayatctgtagccttcggg

SEQ ID NO: 894 - DNA, 23 bp, Artificial Sequence
  Synthetic Polynucleotide
gagattayatctgtagccttcgg

SEQ ID NO: 895 - DNA, 23 bp, Artificial Sequence
  Synthetic Polynucleotide
gatggyagttaatgagctcaggg

SEQ ID NO: 896 - DNA, 23 bp, Artificial Sequence
  Synthetic Polynucleotide
tgatggyagttaatgagctcagg

SEQ ID NO: 897 - DNA, 23 bp, Artificial Sequence
  Synthetic Polynucleotide
gatgaggyagatgcacacaaagg

SEQ ID NO: 898 - DNA, 23 bp, Artificial Sequence
  Synthetic Polynucleotide
gataggyacatatcaaaccaggg

SEQ ID NO: 899 - DNA, 23 bp, Artificial Sequence
  Synthetic Polynucleotide
agataggyacatatcaaaccagg

SEQ ID NO: 900 - DNA, 23 bp, Artificial Sequence
  Synthetic Polynucleotide
gagaytggaaattttggccgtgg

SEQ ID NO: 901 - DNA, 23 bp, Artificial Sequence
  Synthetic Polynucleotide
gataytcacaattacaactgggg

SEQ ID NO: 902 - DNA, 23 bp, Artificial Sequence
  Synthetic Polynucleotide
agataytcacaattacaactggg

SEQ ID NO: 903 - DNA, 23 bp, Artificial Sequence
  Synthetic Polynucleotide
gagataytcacaattacaactgg

SEQ ID NO: 904 - DNA, 23 bp, Artificial Sequence
  Synthetic Polynucleotide
gagaggygagaagagggaagcgg

SEQ ID NO: 905 - DNA, 23 bp, Artificial Sequence
  Synthetic Polynucleotide
gagaagaygacccaggtgagtgg

SEQ ID NO: 906 - DNA, 23 bp, Artificial Sequence
  Synthetic Polynucleotide
gacttygagttcagacatgaggg

SEQ ID NO: 907 - DNA, 23 bp, Artificial Sequence
  Synthetic Polynucleotide
ggacttygagttcagacatgagg

SEQ ID NO: 908 - DNA, 23 bp, Artificial Sequence
  Synthetic Polynucleotide
gacaytgatgaatgtcgctatgg

SEQ ID NO: 909 - DNA, 23 bp, Artificial Sequence
  Synthetic Polynucleotide
gacayggtagatgatcagcgggg

SEQ ID NO: 910 - DNA, 23 bp, Artificial Sequence
  Synthetic Polynucleotide
tgacayggtagatgatcagcggg

SEQ ID NO: 911 - DNA, 23 bp, Artificial Sequence
  Synthetic Polynucleotide
atgacayggtagatgatcagcgg

SEQ ID NO: 912 - DNA, 23 bp, Artificial Sequence
  Synthetic Polynucleotide
gacaygaagggagatgctgaggg

SEQ ID NO: 913 - DNA, 23 bp, Artificial Sequence
  Synthetic Polynucleotide
agacaygaagggagatgctgagg

SEQ ID NO: 914 - DNA, 23 bp, Artificial Sequence
  Synthetic Polynucleotide
gacatytggagggtccccgatgg

SEQ ID NO: 915 - DNA, 23 bp, Artificial Sequence
  Synthetic Polynucleotide
gacagagytcctccacaacatgg

SEQ ID NO: 916 - DNA, 23 bp, Artificial Sequence
  Synthetic Polynucleotide
gaayatataccaaggtatcccgg

SEQ ID NO: 917 - DNA, 23 bp, Artificial Sequence
  Synthetic Polynucleotide
gaatgtaygataatgaacggagg

SEQ ID NO: 918 - DNA, 23 bp, Artificial Sequence
  Synthetic Polynucleotide
gaagtaayaggtgaccccagggg

SEQ ID NO: 919 - DNA, 23 bp, Artificial Sequence
  Synthetic Polynucleotide
gaaggygtggtagggaggcacgg

SEQ ID NO: 920 - DNA, 23 bp, Artificial Sequence
  Synthetic Polynucleotide
aaggygtggtagggaggcacggg

SEQ ID NO: 921 - DNA, 23 bp, Artificial Sequence
  Synthetic Polynucleotide
aggygtggtagggaggcacgggg

SEQ ID NO: 922 - DNA, 23 bp, Artificial Sequence
  Synthetic Polynucleotide
gaaataygatggggcgctcaggg

SEQ ID NO: 923 - DNA, 23 bp, Artificial Sequence
  Synthetic Polynucleotide
agaaataygatggggcgctcagg

SEQ ID NO: 924 - DNA, 23 bp, Artificial Sequence
  Synthetic Polynucleotide
cttgygttatgatggattcatgg

SEQ ID NO: 925 - DNA, 23 bp, Artificial Sequence
  Synthetic Polynucleotide
cttayagatctcatcaatgttgg

SEQ ID NO: 926 - DNA, 23 bp, Artificial Sequence
  Synthetic Polynucleotide
cttaggyaagtaatgcaatatgg

SEQ ID NO: 927 - DNA, 23 bp, Artificial Sequence
  Synthetic Polynucleotide
ctgyggatgcactggggtgcggg

SEQ ID NO: 928 - DNA, 23 bp, Artificial Sequence
  Synthetic Polynucleotide
tctgyggatgcactggggtgcgg

SEQ ID NO: 929 - DNA, 23 bp, Artificial Sequence
  Synthetic Polynucleotide
ctgtgyaagtaatacaactttgg

SEQ ID NO: 930 - DNA, 23 bp, Artificial Sequence
  Synthetic Polynucleotide
ctgtgtgygccagggctgtgggg

SEQ ID NO: 931 - DNA, 23 bp, Artificial Sequence
  Synthetic Polynucleotide
ctgtgagygtgcccaggggcggg

SEQ ID NO: 932 - DNA, 23 bp, Artificial Sequence
  Synthetic Polynucleotide
tgagygtgcccaggggcgggcgg

SEQ ID NO: 933 - DNA, 23 bp, Artificial Sequence
  Synthetic Polynucleotide
ctggyaaaaaacctggtttttgg

SEQ ID NO: 934 - DNA, 23 bp, Artificial Sequence
  Synthetic Polynucleotide
tggyaaaaaacctggtttttggg

SEQ ID NO: 935 - DNA, 23 bp, Artificial Sequence
  Synthetic Polynucleotide
tgatyttcagcctccttttgggg

SEQ ID NO: 936 - DNA, 23 bp, Artificial Sequence
  Synthetic Polynucleotide
ctgatyttcagcctccttttggg

SEQ ID NO: 937 - DNA, 23 bp, Artificial Sequence
  Synthetic Polynucleotide
gctgatyttcagcctccttttgg

SEQ ID NO: 938 - DNA, 23 bp, Artificial Sequence
  Synthetic Polynucleotide
ctgaagytggtctgacctcaggg

SEQ ID NO: 939 - DNA, 23 bp, Artificial Sequence
  Synthetic Polynucleotide
gctgaagytggtctgacctcagg

SEQ ID NO: 940 - DNA, 23 bp, Artificial Sequence
  Synthetic Polynucleotide
ctcytgatgttgttgtgagctgg

SEQ ID NO: 941 - DNA, 23 bp, Artificial Sequence
  Synthetic Polynucleotide
ctcyagggccgcaggttggaggg

SEQ ID NO: 942 - DNA, 23 bp, Artificial Sequence
  Synthetic Polynucleotide
gctcyagggccgcaggttggagg

SEQ ID NO: 943 - DNA, 23 bp, Artificial Sequence
  Synthetic Polynucleotide
ggcgctcyagggccgcaggttgg

SEQ ID NO: 944 - DNA, 23 bp, Artificial Sequence
  Synthetic Polynucleotide
ctcayggttggttggcaagaagg

SEQ ID NO: 945 - DNA, 23 bp, Artificial Sequence
  Synthetic Polynucleotide
ctcaygatctgggatctcagagg

SEQ ID NO: 946 - DNA, 23 bp, Artificial Sequence
  Synthetic Polynucleotide
ctcayaggccattgcgaccacgg

SEQ ID NO: 947 - DNA, 23 bp, Artificial Sequence
  Synthetic Polynucleotide
ctcaayagatgccatctccctgg

SEQ ID NO: 948 - DNA, 23 bp, Artificial Sequence
  Synthetic Polynucleotide
ctataytgttcatcccctctggg

SEQ ID NO: 949 - DNA, 23 bp, Artificial Sequence
  Synthetic Polynucleotide
actataytgttcatcccctctgg

SEQ ID NO: 950 - DNA, 23 bp, Artificial Sequence
  Synthetic Polynucleotide
cgtggytggggaagggcagctgg

SEQ ID NO: 951 - DNA, 23 bp, Artificial Sequence
  Synthetic Polynucleotide
cgtaataygggaaaaaggcgtgg

SEQ ID NO: 952 - DNA, 23 bp, Artificial Sequence
  Synthetic Polynucleotide
aataygggaaaaaggcgtggtgg

SEQ ID NO: 953 - DNA, 23 bp, Artificial Sequence
  Synthetic Polynucleotide
ataygggaaaaaggcgtggtggg

SEQ ID NO: 954 - DNA, 23 bp, Artificial Sequence
  Synthetic Polynucleotide
cggytgaactctcagtcttctgg

SEQ ID NO: 955 - DNA, 23 bp, Artificial Sequence
  Synthetic Polynucleotide
actgcggyatgggcggggccagg

SEQ ID NO: 956 - DNA, 23 bp, Artificial Sequence
  Synthetic Polynucleotide
ctgcggyatgggcggggccaggg

SEQ ID NO: 957 - DNA, 23 bp, Artificial Sequence
  Synthetic Polynucleotide
cggyatgggcggggccagggtgg

SEQ ID NO: 958 - DNA, 23 bp, Artificial Sequence
  Synthetic Polynucleotide
cggtytgaagcgtgcagagatgg

SEQ ID NO: 959 - DNA, 23 bp, Artificial Sequence
  Synthetic Polynucleotide
cgcyttgaaaaaaaaagaaaggg

SEQ ID NO: 960 - DNA, 23 bp, Artificial Sequence
  Synthetic Polynucleotide
tcgcyttgaaaaaaaaagaaagg

SEQ ID NO: 961 - DNA, 23 bp, Artificial Sequence
  Synthetic Polynucleotide
cgcygaagatgaggcagaccagg

SEQ ID NO: 962 - DNA, 23 bp, Artificial Sequence
  Synthetic Polynucleotide
cgcggytgagggtgtagaagtgg

SEQ ID NO: 963 - DNA, 23 bp, Artificial Sequence
  Synthetic Polynucleotide
cgcaygatccacagcaccaatgg

SEQ ID NO: 964 - DNA, 23 bp, Artificial Sequence
  Synthetic Polynucleotide
cgaygttgaagagggcaggcagg

SEQ ID NO: 965 - DNA, 23 bp, Artificial Sequence
  Synthetic Polynucleotide
agcccgaygttgaagagggcagg

SEQ ID NO: 966 - DNA, 23 bp, Artificial Sequence
  Synthetic Polynucleotide
cgaggyggtggtggtccaagtgg

SEQ ID NO: 967 - DNA, 23 bp, Artificial Sequence
  Synthetic Polynucleotide
cgaggyattgccagcagtgcagg

SEQ ID NO: 968 - DNA, 23 bp, Artificial Sequence
  Synthetic Polynucleotide
cgaaaygtgtatctcctcccagg

SEQ ID NO: 969 - DNA, 23 bp, Artificial Sequence
  Synthetic Polynucleotide
cgaaatgyaagtctagttagagg

SEQ ID NO: 970 - DNA, 23 bp, Artificial Sequence
  Synthetic Polynucleotide
gaaatgyaagtctagttagaggg

SEQ ID NO: 971 - DNA, 23 bp, Artificial Sequence
  Synthetic Polynucleotide
cctgtgygtcccccaggggcagg

SEQ ID NO: 972 - DNA, 23 bp, Artificial Sequence
  Synthetic Polynucleotide
ctgtgygtcccccaggggcaggg

SEQ ID NO: 973 - DNA, 23 bp, Artificial Sequence
  Synthetic Polynucleotide
tgtgygtcccccaggggcagggg

SEQ ID NO: 974 - DNA, 23 bp, Artificial Sequence
  Synthetic Polynucleotide
gtgygtcccccaggggcaggggg

SEQ ID NO: 975 - DNA, 23 bp, Artificial Sequence
  Synthetic Polynucleotide
cctaaaaygttggatgctgaagg

SEQ ID NO: 976 - DNA, 23 bp, Artificial Sequence
  Synthetic Polynucleotide
ccggygaggccctggggcggggg

SEQ ID NO: 977 - DNA, 23 bp, Artificial Sequence
  Synthetic Polynucleotide
tccggygaggccctggggcgggg

SEQ ID NO: 978 - DNA, 23 bp, Artificial Sequence
  Synthetic Polynucleotide
atccggygaggccctggggcggg

SEQ ID NO: 979 - DNA, 23 bp, Artificial Sequence
  Synthetic Polynucleotide
gatccggygaggccctggggcgg

SEQ ID NO: 980 - DNA, 23 bp, Artificial Sequence
  Synthetic Polynucleotide
tgayccagggggtctatgggagg

SEQ ID NO: 981 - DNA, 23 bp, Artificial Sequence
  Synthetic Polynucleotide
cggtgayccagggggtctatggg

SEQ ID NO: 982 - DNA, 23 bp, Artificial Sequence
  Synthetic Polynucleotide
ccggtgayccagggggtctatgg

SEQ ID NO: 983 - DNA, 23 bp, Artificial Sequence
  Synthetic Polynucleotide
cccygaaggtggaggatgcaggg

SEQ ID NO: 984 - DNA, 23 bp, Artificial Sequence
  Synthetic Polynucleotide
gcccygaaggtggaggatgcagg

SEQ ID NO: 985 - DNA, 23 bp, Artificial Sequence
  Synthetic Polynucleotide
ccctygggtgcaggtttgtgagg

SEQ ID NO: 986 - DNA, 23 bp, Artificial Sequence
  Synthetic Polynucleotide
cccaygtacctgccgcgccctgg

SEQ ID NO: 987 - DNA, 23 bp, Artificial Sequence
  Synthetic Polynucleotide
ccaytggtcttgagccaagtggg

SEQ ID NO: 988 - DNA, 23 bp, Artificial Sequence
  Synthetic Polynucleotide
tccaytggtcttgagccaagtgg

SEQ ID NO: 989 - DNA, 23 bp, Artificial Sequence
  Synthetic Polynucleotide
ccaygttgtcaatgtccagctgg

SEQ ID NO: 990 - DNA, 23 bp, Artificial Sequence
  Synthetic Polynucleotide
ccaygtggaccctggtgagctgg

SEQ ID NO: 991 - DNA, 23 bp, Artificial Sequence
  Synthetic Polynucleotide
tgtccaygatggcggcgcggcgg

SEQ ID NO: 992 - DNA, 23 bp, Artificial Sequence
  Synthetic Polynucleotide
ccaygatggcggcgcggcggcgg

SEQ ID NO: 993 - DNA, 23 bp, Artificial Sequence
  Synthetic Polynucleotide
ccayagaagcccacgatgtacgg

SEQ ID NO: 994 - DNA, 23 bp, Artificial Sequence
  Synthetic Polynucleotide
ccaggyatcccgggggtaggtgg

SEQ ID NO: 995 - DNA, 23 bp, Artificial Sequence
  Synthetic Polynucleotide
caggyatcccgggggtaggtggg

SEQ ID NO: 996 - DNA, 23 bp, Artificial Sequence
  Synthetic Polynucleotide
ccagaytgtcagcaaacacctgg

SEQ ID NO: 997 - DNA, 23 bp, Artificial Sequence
  Synthetic Polynucleotide
ccaagygagtacagcgcacctgg

SEQ ID NO: 998 - DNA, 23 bp, Artificial Sequence
  Synthetic Polynucleotide
caagygagtacagcgcacctggg

SEQ ID NO: 999 - DNA, 23 bp, Artificial Sequence
  Synthetic Polynucleotide
aagygagtacagcgcacctgggg

SEQ ID NO: 1000 - DNA, 23 bp, Artificial Sequence
  Synthetic Polynucleotide
agaytaccaccacctggtggagg

SEQ ID NO: 1001 - DNA, 23 bp, Artificial Sequence
  Synthetic Polynucleotide
ccaagaytaccaccacctggtgg

SEQ ID NO: 1002 - DNA, 23 bp, Artificial Sequence
  Synthetic Polynucleotide
catgygagtgcaggcggagcagg

SEQ ID NO: 1003 - DNA, 23 bp, Artificial Sequence
  Synthetic Polynucleotide
cagytgaatttgtgtgtaaacgg

SEQ ID NO: 1004 - DNA, 23 bp, Artificial Sequence
  Synthetic Polynucleotide
cagyggtacagggtgaccacggg

SEQ ID NO: 1005 - DNA, 23 bp, Artificial Sequence
  Synthetic Polynucleotide
ccagyggtacagggtgaccacgg

SEQ ID NO: 1006 - DNA, 23 bp, Artificial Sequence
  Synthetic Polynucleotide
cagyagagcttgcggcgccgggg

SEQ ID NO: 1007 - DNA, 23 bp, Artificial Sequence
  Synthetic Polynucleotide
gcagyagagcttgcggcgccggg

SEQ ID NO: 1008 - DNA, 23 bp, Artificial Sequence
  Synthetic Polynucleotide
cgcagyagagcttgcggcgccgg

SEQ ID NO: 1009 - DNA, 23 bp, Artificial Sequence
  Synthetic Polynucleotide
cagttagygattggcaactttgg

SEQ ID NO: 1010 - DNA, 23 bp, Artificial Sequence
  Synthetic Polynucleotide
cagtggygagactcgcccgcagg

SEQ ID NO: 1011 - DNA, 23 bp, Artificial Sequence
  Synthetic Polynucleotide
agtggygagactcgcccgcaggg

SEQ ID NO: 1012 - DNA, 23 bp, Artificial Sequence
  Synthetic Polynucleotide
caggtggyacacgaagtcctggg

SEQ ID NO: 1013 - DNA, 23 bp, Artificial Sequence
  Synthetic Polynucleotide
cagaggtyctttgacagctttgg

SEQ ID NO: 1014 - DNA, 23 bp, Artificial Sequence
  Synthetic Polynucleotide
agcacytgtgaggaagttcctgg

SEQ ID NO: 1015 - DNA, 23 bp, Artificial Sequence
  Synthetic Polynucleotide
gcacytgtgaggaagttcctggg

SEQ ID NO: 1016 - DNA, 23 bp, Artificial Sequence
  Synthetic Polynucleotide
cacytgtgaggaagttcctgggg

SEQ ID NO: 1017 - DNA, 23 bp, Artificial Sequence
  Synthetic Polynucleotide
cacygagggaaagcactgcaggg

SEQ ID NO: 1018 - DNA, 23 bp, Artificial Sequence
  Synthetic Polynucleotide
gcacygagggaaagcactgcagg

SEQ ID NO: 1019 - DNA, 23 bp, Artificial Sequence
  Synthetic Polynucleotide
cactgytgacgaaggtagcaggg

SEQ ID NO: 1020 - DNA, 23 bp, Artificial Sequence
  Synthetic Polynucleotide
gcactgytgacgaaggtagcagg

SEQ ID NO: 1021 - DNA, 23 bp, Artificial Sequence
  Synthetic Polynucleotide
cactgygagtaagctggaagtgg

SEQ ID NO: 1022 - DNA, 23 bp, Artificial Sequence
  Synthetic Polynucleotide
cactggygtatacacaggtgagg

SEQ ID NO: 1023 - DNA, 23 bp, Artificial Sequence
  Synthetic Polynucleotide
cactggayatggaaatagagagg

SEQ ID NO: 1024 - DNA, 23 bp, Artificial Sequence
  Synthetic Polynucleotide
cactaytggggtctcggtcaagg

SEQ ID NO: 1025 - DNA, 23 bp, Artificial Sequence
  Synthetic Polynucleotide
gcacgygagtggccatcctcagg

SEQ ID NO: 1026 - DNA, 23 bp, Artificial Sequence
  Synthetic Polynucleotide
cacgygagtggccatcctcaggg

SEQ ID NO: 1027 - DNA, 23 bp, Artificial Sequence
  Synthetic Polynucleotide
cacgagtytcttactgagaatgg

SEQ ID NO: 1028 - DNA, 23 bp, Artificial Sequence
  Synthetic Polynucleotide
gagtytcttactgagaatggagg

SEQ ID NO: 1029 - DNA, 23 bp, Artificial Sequence
  Synthetic Polynucleotide
cacaytgacacatgtggccaggg

SEQ ID NO: 1030 - DNA, 23 bp, Artificial Sequence
  Synthetic Polynucleotide
ccacaytgacacatgtggccagg

SEQ ID NO: 1031 - DNA, 23 bp, Artificial Sequence
  Synthetic Polynucleotide
cacataayacgaactggtgctgg

SEQ ID NO: 1032 - DNA, 23 bp, Artificial Sequence
  Synthetic Polynucleotide
cacagygggtccctgtctcctgg

SEQ ID NO: 1033 - DNA, 23 bp, Artificial Sequence
  Synthetic Polynucleotide
acagygggtccctgtctcctggg

SEQ ID NO: 1034 - DNA, 23 bp, Artificial Sequence
  Synthetic Polynucleotide
caaygatgagcttgaagatgagg

SEQ ID NO: 1035 - DNA, 23 bp, Artificial Sequence
  Synthetic Polynucleotide
caaygaagaggaattgcccctgg

SEQ ID NO: 1036 - DNA, 23 bp, Artificial Sequence
  Synthetic Polynucleotide
caagtygttagctgccaacaagg

SEQ ID NO: 1037 - DNA, 23 bp, Artificial Sequence
  Synthetic Polynucleotide
caagaytggggacttcgggctgg

SEQ ID NO: 1038 - DNA, 23 bp, Artificial Sequence
  Synthetic Polynucleotide
caagayggcggctcccagggagg

SEQ ID NO: 1039 - DNA, 23 bp, Artificial Sequence
  Synthetic Polynucleotide
caagaggytggtgatctgcaagg

SEQ ID NO: 1040 - DNA, 23 bp, Artificial Sequence
  Synthetic Polynucleotide
caagaayagtaggtaaggccagg

SEQ ID NO: 1041 - DNA, 23 bp, Artificial Sequence
  Synthetic Polynucleotide
caagaaaygtgctgctgatctgg

SEQ ID NO: 1042 - DNA, 23 bp, Artificial Sequence
  Synthetic Polynucleotide
aagaaaygtgctgctgatctggg

SEQ ID NO: 1043 - DNA, 23 bp, Artificial Sequence
  Synthetic Polynucleotide
caaaatayggaacttgattttgg

SEQ ID NO: 1044 - DNA, 23 bp, Artificial Sequence
  Synthetic Polynucleotide
attgaaayagagtaacaagaagg

SEQ ID NO: 1045 - DNA, 23 bp, Artificial Sequence
  Synthetic Polynucleotide
atgytggaggcttggaactctgg

SEQ ID NO: 1046 - DNA, 23 bp, Artificial Sequence
  Synthetic Polynucleotide
atgtatyaattacagacacttgg

SEQ ID NO: 1047 - DNA, 23 bp, Artificial Sequence
  Synthetic Polynucleotide
atggyaaggagcaagggagcagg

SEQ ID NO: 1048 - DNA, 23 bp, Artificial Sequence
  Synthetic Polynucleotide
atcytagggtaaggtgacttagg

SEQ ID NO: 1049 - DNA, 23 bp, Artificial Sequence
  Synthetic Polynucleotide
atcyaaagcaaaagacaagcagg

SEQ ID NO: 1050 - DNA, 23 bp, Artificial Sequence
  Synthetic Polynucleotide
atcaytggggtggatcccgaagg

SEQ ID NO: 1051 - DNA, 23 bp, Artificial Sequence
  Synthetic Polynucleotide
tcaytggggtggatcccgaaggg

SEQ ID NO: 1052 - DNA, 23 bp, Artificial Sequence
  Synthetic Polynucleotide
atcatytggaacagtctacaagg

SEQ ID NO: 1053 - DNA, 23 bp, Artificial Sequence
  Synthetic Polynucleotide
tcatytggaacagtctacaaggg

SEQ ID NO: 1054 - DNA, 23 bp, Artificial Sequence
  Synthetic Polynucleotide
atcattgygagtgtattataagg

SEQ ID NO: 1055 - DNA, 23 bp, Artificial Sequence
  Synthetic Polynucleotide
tcattgygagtgtattataaggg

SEQ ID NO: 1056 - DNA, 23 bp, Artificial Sequence
  Synthetic Polynucleotide
cattgygagtgtattataagggg

SEQ ID NO: 1057 - DNA, 23 bp, Artificial Sequence
  Synthetic Polynucleotide
atcatggyaagcaagaaacaagg

SEQ ID NO: 1058 - DNA, 23 bp, Artificial Sequence
  Synthetic Polynucleotide
atayagttttcagggcccggagg

SEQ ID NO: 1059 - DNA, 23 bp, Artificial Sequence
  Synthetic Polynucleotide
ctgatayagttttcagggcccgg

SEQ ID NO: 1060 - DNA, 23 bp, Artificial Sequence
  Synthetic Polynucleotide
atatagaygcctctgctcccagg

SEQ ID NO: 1061 - DNA, 23 bp, Artificial Sequence
  Synthetic Polynucleotide
atagtgtycctaaaaggcacggg

SEQ ID NO: 1062 - DNA, 23 bp, Artificial Sequence
  Synthetic Polynucleotide
atagatgycagcacgtttgaagg

SEQ ID NO: 1063 - DNA, 23 bp, Artificial Sequence
  Synthetic Polynucleotide
agtaygtgaagctccagctgtgg

SEQ ID NO: 1064 - DNA, 23 bp, Artificial Sequence
  Synthetic Polynucleotide
cttcaggygagggctggggtggg

SEQ ID NO: 1065 - DNA, 23 bp, Artificial Sequence
  Synthetic Polynucleotide
aggygagggctggggtgggcagg

SEQ ID NO: 1066 - DNA, 23 bp, Artificial Sequence
  Synthetic Polynucleotide
aggtgagyaatctgtcagcaggg

SEQ ID NO: 1067 - DNA, 23 bp, Artificial Sequence
  Synthetic Polynucleotide
agggytggagtaggggccatcgg

SEQ ID NO: 1068 - DNA, 23 bp, Artificial Sequence
  Synthetic Polynucleotide
agggaytgcctacaaacaccagg

SEQ ID NO: 1069 - DNA, 23 bp, Artificial Sequence
  Synthetic Polynucleotide
agcygtgggacaagagcagccgg

SEQ ID NO: 1070 - DNA, 23 bp, Artificial Sequence
  Synthetic Polynucleotide
agcyggtattccctctcgagtgg

SEQ ID NO: 1071 - DNA, 23 bp, Artificial Sequence
  Synthetic Polynucleotide
agcygggtgcccagtacccttgg

SEQ ID NO: 1072 - DNA, 23 bp, Artificial Sequence
  Synthetic Polynucleotide
gagcyggggactggacaatttgg

SEQ ID NO: 1073 - DNA, 23 bp, Artificial Sequence
  Synthetic Polynucleotide
agcyggggactggacaatttggg

SEQ ID NO: 1074 - DNA, 23 bp, Artificial Sequence
  Synthetic Polynucleotide
agcyaggtggcgacctgctccgg

SEQ ID NO: 1075 - DNA, 23 bp, Artificial Sequence
  Synthetic Polynucleotide
agcttytttgtagacaggcatgg

SEQ ID NO: 1076 - DNA, 23 bp, Artificial Sequence
  Synthetic Polynucleotide
agctgtgygatgaagcaggcagg

SEQ ID NO: 1077 - DNA, 23 bp, Artificial Sequence
  Synthetic Polynucleotide
gctggaycgaggccttaaaaggg

SEQ ID NO: 1078 - DNA, 23 bp, Artificial Sequence
  Synthetic Polynucleotide
agctggaycgaggccttaaaagg

SEQ ID NO: 1079 - DNA, 23 bp, Artificial Sequence
  Synthetic Polynucleotide
agctayggccgcagtgattctgg

SEQ ID NO: 1080 - DNA, 23 bp, Artificial Sequence
  Synthetic Polynucleotide
attgycttcccattcccaggtgg

SEQ ID NO: 1081 - DNA, 23 bp, Artificial Sequence
  Synthetic Polynucleotide
agcattgycttcccattcccagg

SEQ ID NO: 1082 - DNA, 23 bp, Artificial Sequence
  Synthetic Polynucleotide
cagcaagbacgtgggcctctggg

SEQ ID NO: 1083 - DNA, 23 bp, Artificial Sequence
  Synthetic Polynucleotide
agcaagbacgtgggcctctgggg

SEQ ID NO: 1084 - DNA, 23 bp, Artificial Sequence
  Synthetic Polynucleotide
gcaagbacgtgggcctctggggg

SEQ ID NO: 1085 - DNA, 23 bp, Artificial Sequence
  Synthetic Polynucleotide
agaytgtggatccgctggcccgg

SEQ ID NO: 1086 - DNA, 23 bp, Artificial Sequence
  Synthetic Polynucleotide
agaytggtgtgcgcaacatccgg

SEQ ID NO: 1087 - DNA, 23 bp, Artificial Sequence
  Synthetic Polynucleotide
agaygagggtctcagccctgcgg

SEQ ID NO: 1088 - DNA, 23 bp, Artificial Sequence
  Synthetic Polynucleotide
agatayggcttctaaaccgaagg

SEQ ID NO: 1089 - DNA, 23 bp, Artificial Sequence
  Synthetic Polynucleotide
agaggytgtgtttacggtagcgg

SEQ ID NO: 1090 - DNA, 23 bp, Artificial Sequence
  Synthetic Polynucleotide
agaagaygctgtttaatctgagg

SEQ ID NO: 1091 - DNA, 23 bp, Artificial Sequence
  Synthetic Polynucleotide
actytttgggatcgacttcctgg

SEQ ID NO: 1092 - DNA, 23 bp, Artificial Sequence
  Synthetic Polynucleotide
actytgatagagtaaataatagg

SEQ ID NO: 1093 - DNA, 23 bp, Artificial Sequence
  Synthetic Polynucleotide
acttytatagtattgaataaagg

SEQ ID NO: 1094 - DNA, 23 bp, Artificial Sequence
  Synthetic Polynucleotide
cttytatagtattgaataaaggg

SEQ ID NO: 1095 - DNA, 23 bp, Artificial Sequence
  Synthetic Polynucleotide
acttygatagagtaaataatagg

SEQ ID NO: 1096 - DNA, 23 bp, Artificial Sequence
  Synthetic Polynucleotide
acttyatttgactactttaatgg

SEQ ID NO: 1097 - DNA, 23 bp, Artificial Sequence
  Synthetic Polynucleotide
cttyattcaaagaccaggaaggg

SEQ ID NO: 1098 - DNA, 23 bp, Artificial Sequence
  Synthetic Polynucleotide
acttyattcaaagaccaggaagg

SEQ ID NO: 1099 - DNA, 23 bp, Artificial Sequence
  Synthetic Polynucleotide
acttttayagtattgaataaagg

SEQ ID NO: 1100 - DNA, 23 bp, Artificial Sequence
  Synthetic Polynucleotide
cttttayagtattgaataaaggg

SEQ ID NO: 1101 - DNA, 23 bp, Artificial Sequence
  Synthetic Polynucleotide
acttayagcttcttgtctccagg

SEQ ID NO: 1102 - DNA, 23 bp, Artificial Sequence
  Synthetic Polynucleotide
actgataycaggtgagagccagg

SEQ ID NO: 1103 - DNA, 23 bp, Artificial Sequence
  Synthetic Polynucleotide
ctgataycaggtgagagccaggg

SEQ ID NO: 1104 - DNA, 23 bp, Artificial Sequence
  Synthetic Polynucleotide
acgytgagctggggctgcgcggg

SEQ ID NO: 1105 - DNA, 23 bp, Artificial Sequence
  Synthetic Polynucleotide
cacgytgagctggggctgcgcgg

SEQ ID NO: 1106 - DNA, 23 bp, Artificial Sequence
  Synthetic Polynucleotide
accytatgatccgcccgccttgg

SEQ ID NO: 1107 - DNA, 23 bp, Artificial Sequence
  Synthetic Polynucleotide
accygtgaagggaacagagatgg

SEQ ID NO: 1108 - DNA, 23 bp, Artificial Sequence
  Synthetic Polynucleotide
ttcaccygtatctgtatggcagg

SEQ ID NO: 1109 - DNA, 23 bp, Artificial Sequence
  Synthetic Polynucleotide
accygtatctgtatggcaggtgg

SEQ ID NO: 1110 - DNA, 23 bp, Artificial Sequence
  Synthetic Polynucleotide
accygagatgcaaaatagggagg

SEQ ID NO: 1111 - DNA, 23 bp, Artificial Sequence
  Synthetic Polynucleotide
gtgaccygagatgcaaaataggg

SEQ ID NO: 1112 - DNA, 23 bp, Artificial Sequence
  Synthetic Polynucleotide
ggtgaccygagatgcaaaatagg

SEQ ID NO: 1113 - DNA, 23 bp, Artificial Sequence
  Synthetic Polynucleotide
accygagagggagggcagccagg

SEQ ID NO: 1114 - DNA, 23 bp, Artificial Sequence
  Synthetic Polynucleotide
acctgygggtgcgtggctgcagg

SEQ ID NO: 1115 - DNA, 23 bp, Artificial Sequence
  Synthetic Polynucleotide
cctgygggtgcgtggctgcaggg

SEQ ID NO: 1116 - DNA, 23 bp, Artificial Sequence
  Synthetic Polynucleotide
accgtygtggcccagcaggacgg

SEQ ID NO: 1117 - DNA, 23 bp, Artificial Sequence
  Synthetic Polynucleotide
acayatttcttaggtttgagggg

SEQ ID NO: 1118 - DNA, 23 bp, Artificial Sequence
  Synthetic Polynucleotide
gacayatttcttaggtttgaggg

SEQ ID NO: 1119 - DNA, 23 bp, Artificial Sequence
  Synthetic Polynucleotide
agacayatttcttaggtttgagg

SEQ ID NO: 1120 - DNA, 23 bp, Artificial Sequence
  Synthetic Polynucleotide
acayatatccctctggacattgg

SEQ ID NO: 1121 - DNA, 23 bp, Artificial Sequence
  Synthetic Polynucleotide
acayagtacaggattcctgcggg

SEQ ID NO: 1122 - DNA, 23 bp, Artificial Sequence
  Synthetic Polynucleotide
gacayagtacaggattcctgcgg

SEQ ID NO: 1123 - DNA, 23 bp, Artificial Sequence
  Synthetic Polynucleotide
acayaggtgcgacggccccaggg

SEQ ID NO: 1124 - DNA, 23 bp, Artificial Sequence
  Synthetic Polynucleotide
gacayaggtgcgacggccccagg

SEQ ID NO: 1125 - DNA, 23 bp, Artificial Sequence
  Synthetic Polynucleotide
acattygggcttttggtaagtgg

SEQ ID NO: 1126 - DNA, 23 bp, Artificial Sequence
  Synthetic Polynucleotide
acatgyagcaggcgcagtagggg

SEQ ID NO: 1127 - DNA, 23 bp, Artificial Sequence
  Synthetic Polynucleotide
gacatgyagcaggcgcagtaggg

SEQ ID NO: 1128 - DNA, 23 bp, Artificial Sequence
  Synthetic Polynucleotide
agacatgyagcaggcgcagtagg

SEQ ID NO: 1129 - DNA, 23 bp, Artificial Sequence
  Synthetic Polynucleotide
acatayatccctctggacattgg

SEQ ID NO: 1130 - DNA, 23 bp, Artificial Sequence
  Synthetic Polynucleotide
acagtyttaggacatcattgtgg

SEQ ID NO: 1131 - DNA, 23 bp, Artificial Sequence
  Synthetic Polynucleotide
acagttayaggttctggtcctgg

SEQ ID NO: 1132 - DNA, 23 bp, Artificial Sequence
  Synthetic Polynucleotide
gttayaggttctggtcctggagg

SEQ ID NO: 1133 - DNA, 23 bp, Artificial Sequence
  Synthetic Polynucleotide
acaaggygagcgtgggctgctgg

SEQ ID NO: 1134 - DNA, 23 bp, Artificial Sequence
  Synthetic Polynucleotide
caaggygagcgtgggctgctggg

SEQ ID NO: 1135 - DNA, 23 bp, Artificial Sequence
  Synthetic Polynucleotide
acaagatygtctacagaaacagg

SEQ ID NO: 1136 - DNA, 23 bp, Artificial Sequence
  Synthetic Polynucleotide
aatyttggaggcagaagctctgg

SEQ ID NO: 1137 - DNA, 23 bp, Artificial Sequence
  Synthetic Polynucleotide
aattygttttcttacaaaatcgg

SEQ ID NO: 1138 - DNA, 23 bp, Artificial Sequence
  Synthetic Polynucleotide
aatgtyggcaccatcctgggagg

SEQ ID NO: 1139 - DNA, 23 bp, Artificial Sequence
  Synthetic Polynucleotide
aatggatyctgaatgtacagagg

SEQ ID NO: 1140 - DNA, 23 bp, Artificial Sequence
  Synthetic Polynucleotide
aataaagyagaatatcgtcaagg

SEQ ID NO: 1141 - DNA, 23 bp, Artificial Sequence
  Synthetic Polynucleotide
aagygtgtgcctgtgtgccgagg

SEQ ID NO: 1142 - DNA, 23 bp, Artificial Sequence
  Synthetic Polynucleotide
aagygattgcagcagtgaaatgg

SEQ ID NO: 1143 - DNA, 23 bp, Artificial Sequence
  Synthetic Polynucleotide
aagyagattttctgccaggtggg

SEQ ID NO: 1144 - DNA, 23 bp, Artificial Sequence
  Synthetic Polynucleotide
gaagyagattttctgccaggtgg

SEQ ID NO: 1145 - DNA, 23 bp, Artificial Sequence
  Synthetic Polynucleotide
gtagaagyagattttctgccagg

SEQ ID NO: 1146 - DNA, 23 bp, Artificial Sequence
  Synthetic Polynucleotide
aagtytgatgcagaccagaaagg

SEQ ID NO: 1147 - DNA, 23 bp, Artificial Sequence
  Synthetic Polynucleotide
aaggaaygtgttttacccggagg

SEQ ID NO: 1148 - DNA, 23 bp, Artificial Sequence
  Synthetic Polynucleotide
aagayggtgacagaaaaggcagg

SEQ ID NO: 1149 - DNA, 23 bp, Artificial Sequence
  Synthetic Polynucleotide
aagaayatgcccaaaacatctgg

SEQ ID NO: 1150 - DNA, 23 bp, Artificial Sequence
  Synthetic Polynucleotide
aagaaaayctacgccatgggtgg

SEQ ID NO: 1151 - DNA, 23 bp, Artificial Sequence
  Synthetic Polynucleotide
aaaayctacgccatgggtggagg

SEQ ID NO: 1152 - DNA, 23 bp, Artificial Sequence
  Synthetic Polynucleotide
aacyagagtaatagcgggtcagg

SEQ ID NO: 1153 - DNA, 23 bp, Artificial Sequence
  Synthetic Polynucleotide
aactyggtcctgcgggatggggg

SEQ ID NO: 1154 - DNA, 23 bp, Artificial Sequence
  Synthetic Polynucleotide
gaactyggtcctgcgggatgggg

SEQ ID NO: 1155 - DNA, 23 bp, Artificial Sequence
  Synthetic Polynucleotide
ggaactyggtcctgcgggatggg

SEQ ID NO: 1156 - DNA, 23 bp, Artificial Sequence
  Synthetic Polynucleotide
aggaactyggtcctgcgggatgg

SEQ ID NO: 1157 - DNA, 23 bp, Artificial Sequence
  Synthetic Polynucleotide
aacagayaatgtcagacaagagg

SEQ ID NO: 1158 - DNA, 23 bp, Artificial Sequence
  Synthetic Polynucleotide
aacaayggtggaacctgagaagg

SEQ ID NO: 1159 - DNA, 23 bp, Artificial Sequence
  Synthetic Polynucleotide
aaatgyttcctgtacacctgtgg

SEQ ID NO: 1160 - DNA, 23 bp, Artificial Sequence
  Synthetic Polynucleotide
aaatatgyggtcacactttgtgg

SEQ ID NO: 1161 - DNA, 23 bp, Artificial Sequence
  Synthetic Polynucleotide
aaaggygggcctgggacctgagg

SEQ ID NO: 1162 - DNA, 23 bp, Artificial Sequence
  Synthetic Polynucleotide
aaaaygtgttggtgcttgagggg

SEQ ID NO: 1163 - DNA, 23 bp, Artificial Sequence
  Synthetic Polynucleotide
gaaaaygtgttggtgcttgaggg

SEQ ID NO: 1164 - DNA, 23 bp, Artificial Sequence
  Synthetic Polynucleotide
agaaaaygtgttggtgcttgagg

SEQ ID NO: 1165 - DNA, 23 bp, Artificial Sequence
  Synthetic Polynucleotide
aaaattygcaagtatgtcttagg

SEQ ID NO: 1166 - DNA, 23 bp, Artificial Sequence
  Synthetic Polynucleotide
aaattygcaagtatgtcttaggg

SEQ ID NO: 1167 - DNA, 23 bp, Artificial Sequence
  Synthetic Polynucleotide
tggttcyaatggatgtctgctgg

SEQ ID NO: 1168 - DNA, 23 bp, Artificial Sequence
  Synthetic Polynucleotide
ggttcyaatggatgtctgctggg

SEQ ID NO: 1169 - DNA, 23 bp, Artificial Sequence
  Synthetic Polynucleotide
tggctgycagggacccagcaagg

SEQ ID NO: 1170 - DNA, 23 bp, Artificial Sequence
  Synthetic Polynucleotide
ctgycagggacccagcaaggagg

SEQ ID NO: 1171 - DNA, 23 bp, Artificial Sequence
  Synthetic Polynucleotide
agttccygacggctgaggagcgg

SEQ ID NO: 1172 - DNA, 23 bp, Artificial Sequence
  Synthetic Polynucleotide
ccagyacggggaggtgtacgagg

SEQ ID NO: 1173 - DNA, 23 bp, Artificial Sequence
  Synthetic Polynucleotide
cagyacggggaggtgtacgaggg

SEQ ID NO: 1174 - DNA, 23 bp, Artificial Sequence
  Synthetic Polynucleotide
agggcygtcggaccttcgagtgg

SEQ ID NO: 1175 - DNA, 23 bp, Artificial Sequence
  Synthetic Polynucleotide
gggcygtcggaccttcgagtggg

SEQ ID NO: 1176 - DNA, 23 bp, Artificial Sequence
  Synthetic Polynucleotide
ggcygtcggaccttcgagtgggg

SEQ ID NO: 1177 - DNA, 23 bp, Artificial Sequence
  Synthetic Polynucleotide
attcccygatgaggcagatgcgg

SEQ ID NO: 1178 - DNA, 23 bp, Artificial Sequence
  Synthetic Polynucleotide
ttcccygatgaggcagatgcggg

SEQ ID NO: 1179 - DNA, 23 bp, Artificial Sequence
  Synthetic Polynucleotide
ataccyggcaagcaatagcgcgg

SEQ ID NO: 1180 - DNA, 23 bp, Artificial Sequence
  Synthetic Polynucleotide
gtaaytgcaagatctacaaaagg

SEQ ID NO: 1181 - DNA, 23 bp, Artificial Sequence
  Synthetic Polynucleotide
acatygacaaccatcggctatgg

SEQ ID NO: 1182 - DNA, 23 bp, Artificial Sequence
  Synthetic Polynucleotide
gaccygctgccgtcagcgcctgg

SEQ ID NO: 1183 - DNA, 23 bp, Artificial Sequence
  Synthetic Polynucleotide
tcccacyggacaactgcctctgg

SEQ ID NO: 1184 - DNA, 23 bp, Artificial Sequence
  Synthetic Polynucleotide
gtagayaccttagagaacaatgg

SEQ ID NO: 1185 - DNA, 23 bp, Artificial Sequence
  Synthetic Polynucleotide
tgccaytgctgtggacaacctgg

SEQ ID NO: 1186 - DNA, 23 bp, Artificial Sequence
  Synthetic Polynucleotide
gtcgcygcccgtggcccctgcgg

SEQ ID NO: 1187 - DNA, 23 bp, Artificial Sequence
  Synthetic Polynucleotide
attggyacgtgatccatcctagg

SEQ ID NO: 1188 - DNA, 23 bp, Artificial Sequence
  Synthetic Polynucleotide
gacggcyctgtaggctttggagg

SEQ ID NO: 1189 - DNA, 23 bp, Artificial Sequence
  Synthetic Polynucleotide
cggccaygcagtcctgtgccagg

SEQ ID NO: 1190 - DNA, 23 bp, Artificial Sequence
  Synthetic Polynucleotide
ggccaygcagtcctgtgccaggg

SEQ ID NO: 1191 - DNA, 23 bp, Artificial Sequence
  Synthetic Polynucleotide
ctgcyggtctaccagggcaaagg

SEQ ID NO: 1192 - DNA, 23 bp, Artificial Sequence
  Synthetic Polynucleotide
tgatytcttgggagaagaactgg

SEQ ID NO: 1193 - DNA, 23 bp, Artificial Sequence
  Synthetic Polynucleotide
gcccygcacgcaaatgtgagtgg

SEQ ID NO: 1194 - DNA, 23 bp, Artificial Sequence
  Synthetic Polynucleotide
cccygcacgcaaatgtgagtggg

SEQ ID NO: 1195 - DNA, 23 bp, Artificial Sequence
  Synthetic Polynucleotide
ttgtgcyaggaagttatgacagg

SEQ ID NO: 1196 - DNA, 23 bp, Artificial Sequence
  Synthetic Polynucleotide
gcgttyacgtgtcccccctttgg

SEQ ID NO: 1197 - DNA, 23 bp, Artificial Sequence
  Synthetic Polynucleotide
cgttyacgtgtcccccctttggg

SEQ ID NO: 1198 - DNA, 23 bp, Artificial Sequence
  Synthetic Polynucleotide
acgctytcaaggtggctgcccgg

SEQ ID NO: 1199 - DNA, 23 bp, Artificial Sequence
  Synthetic Polynucleotide
cgctytcaaggtggctgcccggg

SEQ ID NO: 1200 - DNA, 23 bp, Artificial Sequence
  Synthetic Polynucleotide
acttycccttattccatccacgg

SEQ ID NO: 1201 - DNA, 23 bp, Artificial Sequence
  Synthetic Polynucleotide
cttycccttattccatccacggg

SEQ ID NO: 1202 - DNA, 23 bp, Artificial Sequence
  Synthetic Polynucleotide
catgyttctgctgatcgtgctgg

SEQ ID NO: 1203 - DNA, 23 bp, Artificial Sequence
  Synthetic Polynucleotide
atgyttctgctgatcgtgctggg

SEQ ID NO: 1204 - DNA, 23 bp, Artificial Sequence
  Synthetic Polynucleotide
aggccyggagccctgtttttagg

SEQ ID NO: 1205 - DNA, 23 bp, Artificial Sequence
  Synthetic Polynucleotide
gcagcycttcttagggggtgtgg

SEQ ID NO: 1206 - DNA, 23 bp, Artificial Sequence
  Synthetic Polynucleotide
accatccyggagggccgcctggg

SEQ ID NO: 1207 - DNA, 23 bp, Artificial Sequence
  Synthetic Polynucleotide
ctacycaactgctggagggaagg

SEQ ID NO: 1208 - DNA, 23 bp, Artificial Sequence
  Synthetic Polynucleotide
gcctccyggcgctacggaagtgg

SEQ ID NO: 1209 - DNA, 23 bp, Artificial Sequence
  Synthetic Polynucleotide
cctccyggcgctacggaagtggg

SEQ ID NO: 1210 - DNA, 23 bp, Artificial Sequence
  Synthetic Polynucleotide
ctccyggcgctacggaagtgggg

SEQ ID NO: 1211 - DNA, 23 bp, Artificial Sequence
  Synthetic Polynucleotide
tagagytctgcttgaaacatagg

SEQ ID NO: 1212 - DNA, 23 bp, Artificial Sequence
  Synthetic Polynucleotide
catcgcgyccaacaaccgtaagg

SEQ ID NO: 1213 - DNA, 23 bp, Artificial Sequence
  Synthetic Polynucleotide
atcgcgyccaacaaccgtaaggg

SEQ ID NO: 1214 - DNA, 23 bp, Artificial Sequence
  Synthetic Polynucleotide
agctctycctcatcatggcctgg

SEQ ID NO: 1215 - DNA, 23 bp, Artificial Sequence
  Synthetic Polynucleotide
tgtgtgcyggcccatcactttgg

SEQ ID NO: 1216 - DNA, 23 bp, Artificial Sequence
  Synthetic Polynucleotide
tccycggtggctcaccacattgg

SEQ ID NO: 1217 - DNA, 23 bp, Artificial Sequence
  Synthetic Polynucleotide
ttccyggtcatgcactacagagg

SEQ ID NO: 1218 - DNA, 23 bp, Artificial Sequence
  Synthetic Polynucleotide
aatayggcggccgaggcggacgg

SEQ ID NO: 1219 - DNA, 23 bp, Artificial Sequence
  Synthetic Polynucleotide
tagcaayggatcgtgggcaatgg

SEQ ID NO: 1220 - DNA, 23 bp, Artificial Sequence
  Synthetic Polynucleotide
acctyaactctgggacctgctgg

SEQ ID NO: 1221 - DNA, 23 bp, Artificial Sequence
  Synthetic Polynucleotide
gccctgcygtacccgctgcccgg

SEQ ID NO: 1222 - DNA, 23 bp, Artificial Sequence
  Synthetic Polynucleotide
tgcygtacccgctgcccggctgg

SEQ ID NO: 1223 - DNA, 23 bp, Artificial Sequence
  Synthetic Polynucleotide
atgycatcagcgtggtgttccgg

SEQ ID NO: 1224 - DNA, 23 bp, Artificial Sequence
  Synthetic Polynucleotide
cagctacygggatgcccccctgg

SEQ ID NO: 1225 - DNA, 23 bp, Artificial Sequence
  Synthetic Polynucleotide
agctacygggatgcccccctggg

SEQ ID NO: 1226 - DNA, 23 bp, Artificial Sequence
  Synthetic Polynucleotide
tgagcyggtgggcccaatgcagg

SEQ ID NO: 1227 - DNA, 23 bp, Artificial Sequence
  Synthetic Polynucleotide
ttacttcyctttggctatgaagg

SEQ ID NO: 1228 - DNA, 23 bp, Artificial Sequence
  Synthetic Polynucleotide
tgcygtaccaagtgccacaaagg

SEQ ID NO: 1229 - DNA, 23 bp, Artificial Sequence
  Synthetic Polynucleotide
ctccayactgagctgtgccacgg

SEQ ID NO: 1230 - DNA, 23 bp, Artificial Sequence
  Synthetic Polynucleotide
ggggygcttcaaggccattgtgg

SEQ ID NO: 1231 - DNA, 23 bp, Artificial Sequence
  Synthetic Polynucleotide
aagctccyggacttttttctggg

SEQ ID NO: 1232 - DNA, 23 bp, Artificial Sequence
  Synthetic Polynucleotide
aaayccaccccttacgagtgcgg

SEQ ID NO: 1233 - DNA, 23 bp, Artificial Sequence
  Synthetic Polynucleotide
ttccggygagtgggccacactgg

SEQ ID NO: 1234 - DNA, 23 bp, Artificial Sequence
  Synthetic Polynucleotide
cacctyctttgcccatcagcagg

SEQ ID NO: 1235 - DNA, 23 bp, Artificial Sequence
  Synthetic Polynucleotide
tcaccgcytcaatgacacagagg

SEQ ID NO: 1236 - DNA, 23 bp, Artificial Sequence
  Synthetic Polynucleotide
ctayccgccatcccatacattgg

SEQ ID NO: 1237 - DNA, 23 bp, Artificial Sequence
  Synthetic Polynucleotide
ttcacccyggtccctgtctgggg

SEQ ID NO: 1238 - DNA, 23 bp, Artificial Sequence
  Synthetic Polynucleotide
gaggccayggagctgctgcaggg

SEQ ID NO: 1239 - DNA, 23 bp, Artificial Sequence
  Synthetic Polynucleotide
ctcactcyaaaaaactttaccgg

SEQ ID NO: 1240 - DNA, 23 bp, Artificial Sequence
  Synthetic Polynucleotide
ggtccyggatgtggtgaggaagg

SEQ ID NO: 1241 - DNA, 23 bp, Artificial Sequence
  Synthetic Polynucleotide
cggcytcaaccccacagcaatgg

SEQ ID NO: 1242 - DNA, 23 bp, Artificial Sequence
  Synthetic Polynucleotide
ggcytcaaccccacagcaatggg

SEQ ID NO: 1243 - DNA, 23 bp, Artificial Sequence
  Synthetic Polynucleotide
gccatccygggtatggggtgggg

SEQ ID NO: 1244 - DNA, 23 bp, Artificial Sequence
  Synthetic Polynucleotide
ccatccygggtatggggtggggg

SEQ ID NO: 1245 - DNA, 23 bp, Artificial Sequence
  Synthetic Polynucleotide
catccygggtatggggtgggggg

SEQ ID NO: 1246 - DNA, 23 bp, Artificial Sequence
  Synthetic Polynucleotide
ggtctytgacgtcttcctggtgg

SEQ ID NO: 1247 - DNA, 23 bp, Artificial Sequence
  Synthetic Polynucleotide
cgcyggccaccagcactgccagg

SEQ ID NO: 1248 - DNA, 23 bp, Artificial Sequence
  Synthetic Polynucleotide
gagygccgcctggaggtgcgagg

SEQ ID NO: 1249 - DNA, 23 bp, Artificial Sequence
  Synthetic Polynucleotide
aatccygtactatgtctacatgg

SEQ ID NO: 1250 - DNA, 23 bp, Artificial Sequence
  Synthetic Polynucleotide
atccygtactatgtctacatggg

SEQ ID NO: 1251 - DNA, 23 bp, Artificial Sequence
  Synthetic Polynucleotide
tccygtactatgtctacatgggg

SEQ ID NO: 1252 - DNA, 23 bp, Artificial Sequence
  Synthetic Polynucleotide
ataytttctggtccattgaaagg

SEQ ID NO: 1253 - DNA, 23 bp, Artificial Sequence
  Synthetic Polynucleotide
catctytgactgtgtctacacgg

SEQ ID NO: 1254 - DNA, 23 bp, Artificial Sequence
  Synthetic Polynucleotide
aggtgcygttctggggcctacgg

SEQ ID NO: 1255 - DNA, 23 bp, Artificial Sequence
  Synthetic Polynucleotide
ggtgcygttctggggcctacggg

SEQ ID NO: 1256 - DNA, 23 bp, Artificial Sequence
  Synthetic Polynucleotide
ggacaaygtagaaatactcctgg

SEQ ID NO: 1257 - DNA, 23 bp, Artificial Sequence
  Synthetic Polynucleotide
cttaytacagttaccagaacagg

SEQ ID NO: 1258 - DNA, 23 bp, Artificial Sequence
  Synthetic Polynucleotide
agcttcayggcgcccgcgccggg

SEQ ID NO: 1259 - DNA, 23 bp, Artificial Sequence
  Synthetic Polynucleotide
tcayggcgcccgcgccgggccgg

SEQ ID NO: 1260 - DNA, 23 bp, Artificial Sequence
  Synthetic Polynucleotide
atctctcytggggctccctgggg

SEQ ID NO: 1261 - DNA, 23 bp, Artificial Sequence
  Synthetic Polynucleotide
tctcytggggctccctggggtgg

SEQ ID NO: 1262 - DNA, 23 bp, Artificial Sequence
  Synthetic Polynucleotide
tcggccygtccaggtgagtgtgg

SEQ ID NO: 1263 - DNA, 23 bp, Artificial Sequence
  Synthetic Polynucleotide
cttcayctgcaaggaggacctgg

SEQ ID NO: 1264 - DNA, 23 bp, Artificial Sequence
  Synthetic Polynucleotide
aagcygctaattggtaggtgagg

SEQ ID NO: 1265 - DNA, 23 bp, Artificial Sequence
  Synthetic Polynucleotide
tcgagaycttcgatgtgagttgg

SEQ ID NO: 1266 - DNA, 23 bp, Artificial Sequence
  Synthetic Polynucleotide
cgagaycttcgatgtgagttggg

SEQ ID NO: 1267 - DNA, 23 bp, Artificial Sequence
  Synthetic Polynucleotide
aagatcaytggtaactcagtagg

SEQ ID NO: 1268 - DNA, 23 bp, Artificial Sequence
  Synthetic Polynucleotide
agatcaytggtaactcagtaggg

SEQ ID NO: 1269 - DNA, 23 bp, Artificial Sequence
  Synthetic Polynucleotide
gatcaytggtaactcagtagggg

SEQ ID NO: 1270 - DNA, 23 bp, Artificial Sequence
  Synthetic Polynucleotide
gggcyggcccccatgtgggaagg

SEQ ID NO: 1271 - DNA, 23 bp, Artificial Sequence
  Synthetic Polynucleotide
gcccytcctgctgttcatcatgg

SEQ ID NO: 1272 - DNA, 23 bp, Artificial Sequence
  Synthetic Polynucleotide
gatgcyggtgttcgacaacctgg

SEQ ID NO: 1273 - DNA, 23 bp, Artificial Sequence
  Synthetic Polynucleotide
aggagygctatttagcatcgagg

SEQ ID NO: 1274 - DNA, 23 bp, Artificial Sequence
  Synthetic Polynucleotide
aggycagctaaataagctatcgg

SEQ ID NO: 1275 - DNA, 23 bp, Artificial Sequence
  Synthetic Polynucleotide
agaacaygctggggcttttgcgg

SEQ ID NO: 1276 - DNA, 23 bp, Artificial Sequence
  Synthetic Polynucleotide
attcytggggagcttagcgatgg

SEQ ID NO: 1277 - DNA, 23 bp, Artificial Sequence
  Synthetic Polynucleotide
tctggcycctttctctacacagg

SEQ ID NO: 1278 - DNA, 23 bp, Artificial Sequence
  Synthetic Polynucleotide
ggcycctttctctacacaggagg

SEQ ID NO: 1279 - DNA, 23 bp, Artificial Sequence
  Synthetic Polynucleotide
tcgcatcytccggatctttgagg

SEQ ID NO: 1280 - DNA, 23 bp, Artificial Sequence
  Synthetic Polynucleotide
cgcatcytccggatctttgaggg

SEQ ID NO: 1281 - DNA, 23 bp, Artificial Sequence
  Synthetic Polynucleotide
gcatcytccggatctttgagggg

SEQ ID NO: 1282 - DNA, 23 bp, Artificial Sequence
  Synthetic Polynucleotide
ctaygggcagagtgggctattgg

SEQ ID NO: 1283 - DNA, 23 bp, Artificial Sequence
  Synthetic Polynucleotide
ggacyggctgtcacgggctcagg

SEQ ID NO: 1284 - DNA, 23 bp, Artificial Sequence
  Synthetic Polynucleotide
gtgaytgcagagagaggacttgg

SEQ ID NO: 1285 - DNA, 23 bp, Artificial Sequence
  Synthetic Polynucleotide
gcttcgcygcatcgctgaaaggg

SEQ ID NO: 1286 - DNA, 23 bp, Artificial Sequence
  Synthetic Polynucleotide
aaatctyagagtgtcccatctgg

SEQ ID NO: 1287 - DNA, 23 bp, Artificial Sequence
  Synthetic Polynucleotide
ccayctggggaggtaggttcagg

SEQ ID NO: 1288 - DNA, 23 bp, Artificial Sequence
  Synthetic Polynucleotide
gaccaytgcgctgcccgcgcagg

SEQ ID NO: 1289 - DNA, 23 bp, Artificial Sequence
  Synthetic Polynucleotide
accaytgcgctgcccgcgcaggg

SEQ ID NO: 1290 - DNA, 23 bp, Artificial Sequence
  Synthetic Polynucleotide
ccaytgcgctgcccgcgcagggg

SEQ ID NO: 1291 - DNA, 23 bp, Artificial Sequence
  Synthetic Polynucleotide
cgcccaygttccccgcaggccgg

SEQ ID NO: 1292 - DNA, 23 bp, Artificial Sequence
  Synthetic Polynucleotide
tccygctggccctcgcggcctgg

SEQ ID NO: 1293 - DNA, 23 bp, Artificial Sequence
  Synthetic Polynucleotide
cctcatcytcaaggccgccgtgg

SEQ ID NO: 1294 - DNA, 23 bp, Artificial Sequence
  Synthetic Polynucleotide
tcggcygcaccccaagttcgtgg

SEQ ID NO: 1295 - DNA, 23 bp, Artificial Sequence
  Synthetic Polynucleotide
aggacctygctgggaaacaatgg

SEQ ID NO: 1296 - DNA, 23 bp, Artificial Sequence
  Synthetic Polynucleotide
acctygctgggaaacaatggtgg

SEQ ID NO: 1297 - DNA, 23 bp, Artificial Sequence
  Synthetic Polynucleotide
cctygctgggaaacaatggtggg

SEQ ID NO: 1298 - DNA, 23 bp, Artificial Sequence
  Synthetic Polynucleotide
ggaggctyacgatgagtgcctgg

SEQ ID NO: 1299 - DNA, 23 bp, Artificial Sequence
  Synthetic Polynucleotide
ggctyacgatgagtgcctggagg

SEQ ID NO: 1300 - DNA, 23 bp, Artificial Sequence
  Synthetic Polynucleotide
ggtgcctytgacgagcacatagg

SEQ ID NO: 1301 - DNA, 23 bp, Artificial Sequence
  Synthetic Polynucleotide
ggcgctaygagttctttcgaggg

SEQ ID NO: 1302 - DNA, 23 bp, Artificial Sequence
  Synthetic Polynucleotide
gcgctaygagttctttcgagggg

SEQ ID NO: 1303 - DNA, 23 bp, Artificial Sequence
  Synthetic Polynucleotide
cccccaygacgtgctggctgcgg

SEQ ID NO: 1304 - DNA, 23 bp, Artificial Sequence
  Synthetic Polynucleotide
ccccaygacgtgctggctgcggg

SEQ ID NO: 1305 - DNA, 23 bp, Artificial Sequence
  Synthetic Polynucleotide
cccaygacgtgctggctgcgggg

SEQ ID NO: 1306 - DNA, 23 bp, Artificial Sequence
  Synthetic Polynucleotide
gcagccyggagcatgggctgtgg

SEQ ID NO: 1307 - DNA, 23 bp, Artificial Sequence
  Synthetic Polynucleotide
ctcacctycaacatcactgcggg

SEQ ID NO: 1308 - DNA, 23 bp, Artificial Sequence
  Synthetic Polynucleotide
cctgtacycgggctcccagaagg

SEQ ID NO: 1309 - DNA, 23 bp, Artificial Sequence
  Synthetic Polynucleotide
cgtgcyggcctcgcgcatggtgg

SEQ ID NO: 1310 - DNA, 23 bp, Artificial Sequence
  Synthetic Polynucleotide
tattcagyctaaaagcagcaagg

SEQ ID NO: 1311 - DNA, 23 bp, Artificial Sequence
  Synthetic Polynucleotide
cctgcyggccaactccaaagtgg

SEQ ID NO: 1312 - DNA, 23 bp, Artificial Sequence
  Synthetic Polynucleotide
tgcytcttcaactaaaatacagg

SEQ ID NO: 1313 - DNA, 23 bp, Artificial Sequence
  Synthetic Polynucleotide
aaaatcygtgccaagcaaccagg

SEQ ID NO: 1314 - DNA, 23 bp, Artificial Sequence
  Synthetic Polynucleotide
aaatcygtgccaagcaaccaggg

SEQ ID NO: 1315 - DNA, 23 bp, Artificial Sequence
  Synthetic Polynucleotide
aatcygtgccaagcaaccagggg

SEQ ID NO: 1316 - DNA, 23 bp, Artificial Sequence
  Synthetic Polynucleotide
caagttcyccgaggtgagtccgg

SEQ ID NO: 1317 - DNA, 23 bp, Artificial Sequence
  Synthetic Polynucleotide
aagttcyccgaggtgagtccggg

SEQ ID NO: 1318 - DNA, 23 bp, Artificial Sequence
  Synthetic Polynucleotide
agttcyccgaggtgagtccgggg

SEQ ID NO: 1319 - DNA, 23 bp, Artificial Sequence
  Synthetic Polynucleotide
agcctytggagtgataccacagg

SEQ ID NO: 1320 - DNA, 23 bp, Artificial Sequence
  Synthetic Polynucleotide
ctttgtcyatggtgagtctgggg

SEQ ID NO: 1321 - DNA, 23 bp, Artificial Sequence
  Synthetic Polynucleotide
ggagcygccctcgccagggaagg

SEQ ID NO: 1322 - DNA, 23 bp, Artificial Sequence
  Synthetic Polynucleotide
gcacytgtgatcaacatgcgagg

SEQ ID NO: 1323 - DNA, 23 bp, Artificial Sequence
  Synthetic Polynucleotide
cactcycgctcattcactcccgg

SEQ ID NO: 1324 - DNA, 23 bp, Artificial Sequence
  Synthetic Polynucleotide
ggacygtggctgccctctcaagg

SEQ ID NO: 1325 - DNA, 23 bp, Artificial Sequence
  Synthetic Polynucleotide
agayggcgggatccaggcaaagg

SEQ ID NO: 1326 - DNA, 23 bp, Artificial Sequence
  Synthetic Polynucleotide
caaccyggccctcagctactcgg

SEQ ID NO: 1327 - DNA, 23 bp, Artificial Sequence
  Synthetic Polynucleotide
ttctycggcttagaggtgactgg

SEQ ID NO: 1328 - DNA, 23 bp, Artificial Sequence
  Synthetic Polynucleotide
aaccycatctccctggtgagagg

SEQ ID NO: 1329 - DNA, 23 bp, Artificial Sequence
  Synthetic Polynucleotide
cgagcytcgcgtggctcccgagg

SEQ ID NO: 1330 - DNA, 23 bp, Artificial Sequence
  Synthetic Polynucleotide
tgggtgyccaataagaccgaagg

SEQ ID NO: 1331 - DNA, 23 bp, Artificial Sequence
  Synthetic Polynucleotide
tatgtyctcctacgtcatgctgg

SEQ ID NO: 1332 - DNA, 23 bp, Artificial Sequence
  Synthetic Polynucleotide
ctattgcytccaaacatttttgg

SEQ ID NO: 1333 - DNA, 23 bp, Artificial Sequence
  Synthetic Polynucleotide
ttcacytctaatggtgattatgg

SEQ ID NO: 1334 - DNA, 23 bp, Artificial Sequence
  Synthetic Polynucleotide
tcacytctaatggtgattatggg

SEQ ID NO: 1335 - DNA, 23 bp, Artificial Sequence
  Synthetic Polynucleotide
catcaytggccgcacactggtgg

SEQ ID NO: 1336 - DNA, 23 bp, Artificial Sequence
  Synthetic Polynucleotide
cgttyggcttgtggtgtaattgg

SEQ ID NO: 1337 - DNA, 23 bp, Artificial Sequence
  Synthetic Polynucleotide
gttyggcttgtggtgtaattggg

SEQ ID NO: 1338 - DNA, 23 bp, Artificial Sequence
  Synthetic Polynucleotide
ggccagygtgtgtgtgagcctgg

SEQ ID NO: 1339 - DNA, 23 bp, Artificial Sequence
  Synthetic Polynucleotide
cctcaacygcgagcagtgtcagg

SEQ ID NO: 1340 - DNA, 23 bp, Artificial Sequence
  Synthetic Polynucleotide
ggccaygggctacccggaggtgg

SEQ ID NO: 1341 - DNA, 23 bp, Artificial Sequence
  Synthetic Polynucleotide
gttgcyggcgcgcctcgcagtgg

SEQ ID NO: 1342 - DNA, 23 bp, Artificial Sequence
  Synthetic Polynucleotide
tggcygtcagttgcaaaaaaagg

SEQ ID NO: 1343 - DNA, 23 bp, Artificial Sequence
  Synthetic Polynucleotide
atgcyggagttcagtttgtttgg

SEQ ID NO: 1344 - DNA, 23 bp, Artificial Sequence
  Synthetic Polynucleotide
gagtttcycatctacgaaagagg

SEQ ID NO: 1345 - DNA, 23 bp, Artificial Sequence
  Synthetic Polynucleotide
ctgccyctgatgagatcaagagg

SEQ ID NO: 1346 - DNA, 23 bp, Artificial Sequence
  Synthetic Polynucleotide
catccycaccatcatcacactgg

SEQ ID NO: 1347 - DNA, 23 bp, Artificial Sequence
  Synthetic Polynucleotide
aggtcaygtgcttccacccctgg

SEQ ID NO: 1348 - DNA, 23 bp, Artificial Sequence
  Synthetic Polynucleotide
caggagcyactcaggaaggtggg

SEQ ID NO: 1349 - DNA, 23 bp, Artificial Sequence
  Synthetic Polynucleotide
gcgctyggccgcgcgccttgagg

SEQ ID NO: 1350 - DNA, 23 bp, Artificial Sequence
  Synthetic Polynucleotide
aacyggcactgggtcgcttttgg

SEQ ID NO: 1351 - DNA, 23 bp, Artificial Sequence
  Synthetic Polynucleotide
acacygttcaggtattgggatgg

SEQ ID NO: 1352 - DNA, 23 bp, Artificial Sequence
  Synthetic Polynucleotide
cgccygaccacgccgaccacagg

SEQ ID NO: 1353 - DNA, 23 bp, Artificial Sequence
  Synthetic Polynucleotide
gccygaccacgccgaccacaggg

SEQ ID NO: 1354 - DNA, 23 bp, Artificial Sequence
  Synthetic Polynucleotide
tccygcgctctgccactgtccgg

SEQ ID NO: 1355 - DNA, 23 bp, Artificial Sequence
  Synthetic Polynucleotide
gggaaccygctgctcaccaccgg

SEQ ID NO: 1356 - DNA, 23 bp, Artificial Sequence
  Synthetic Polynucleotide
aaccygctgctcaccaccggtgg

SEQ ID NO: 1357 - DNA, 23 bp, Artificial Sequence
  Synthetic Polynucleotide
gggycactcaagggacagcccgg

SEQ ID NO: 1358 - DNA, 23 bp, Artificial Sequence
  Synthetic Polynucleotide
ggaccygcctgtggatgcagtgg

SEQ ID NO: 1359 - DNA, 23 bp, Artificial Sequence
  Synthetic Polynucleotide
ctaccyggacggcaggtgtgtgg

SEQ ID NO: 1360 - DNA, 23 bp, Artificial Sequence
  Synthetic Polynucleotide
ggaacacygtccattggcatggg

SEQ ID NO: 1361 - DNA, 23 bp, Artificial Sequence
  Synthetic Polynucleotide
gaacacygtccattggcatgggg

SEQ ID NO: 1362 - DNA, 23 bp, Artificial Sequence
  Synthetic Polynucleotide
gctccygctgctctccgacacgg

SEQ ID NO: 1363 - DNA, 23 bp, Artificial Sequence
  Synthetic Polynucleotide
ttcacaygtctgtgcatgccagg

SEQ ID NO: 1364 - DNA, 23 bp, Artificial Sequence
  Synthetic Polynucleotide
atcattcytttgggaagtggagg

SEQ ID NO: 1365 - DNA, 23 bp, Artificial Sequence
  Synthetic Polynucleotide
tcattcytttgggaagtggaggg

SEQ ID NO: 1366 - DNA, 23 bp, Artificial Sequence
  Synthetic Polynucleotide
aactccaygtataagctgacagg

SEQ ID NO: 1367 - DNA, 23 bp, Artificial Sequence
  Synthetic Polynucleotide
catcatgyccatcctggaagagg

SEQ ID NO: 1368 - DNA, 23 bp, Artificial Sequence
  Synthetic Polynucleotide
gtagtctytcatgagaggagtgg

SEQ ID NO: 1369 - DNA, 23 bp, Artificial Sequence
  Synthetic Polynucleotide
gctcaygagggcacagagcatgg

SEQ ID NO: 1370 - DNA, 23 bp, Artificial Sequence
  Synthetic Polynucleotide
atgcaaayatctgtctgaaacgg

SEQ ID NO: 1371 - DNA, 23 bp, Artificial Sequence
  Synthetic Polynucleotide
agcaytgcaaccacattgtcagg

SEQ ID NO: 1372 - DNA, 23 bp, Artificial Sequence
  Synthetic Polynucleotide
tgcccyccacctggggtcacagg

SEQ ID NO: 1373 - DNA, 23 bp, Artificial Sequence
  Synthetic Polynucleotide
ctggggcyggtattcatgaaagg

SEQ ID NO: 1374 - DNA, 23 bp, Artificial Sequence
  Synthetic Polynucleotide
gtaatcygcaaaggaggagaagg

SEQ ID NO: 1375 - DNA, 23 bp, Artificial Sequence
  Synthetic Polynucleotide
taatcygcaaaggaggagaaggg

SEQ ID NO: 1376 - DNA, 23 bp, Artificial Sequence
  Synthetic Polynucleotide
cccyacccaacgctgccgcctgg

SEQ ID NO: 1377 - DNA, 23 bp, Artificial Sequence
  Synthetic Polynucleotide
caatcyacttctcccgccgccgg

SEQ ID NO: 1378 - DNA, 23 bp, Artificial Sequence
  Synthetic Polynucleotide
aatcyacttctcccgccgccggg

SEQ ID NO: 1379 - DNA, 23 bp, Artificial Sequence
  Synthetic Polynucleotide
ctgccagygcctgctgaagaagg

SEQ ID NO: 1380 - DNA, 23 bp, Artificial Sequence
  Synthetic Polynucleotide
ccagygcctgctgaagaaggagg

SEQ ID NO: 1381 - DNA, 23 bp, Artificial Sequence
  Synthetic Polynucleotide
aaactggyccttatacctgttgg

SEQ ID NO: 1382 - DNA, 23 bp, Artificial Sequence
  Synthetic Polynucleotide
aactggyccttatacctgttggg

SEQ ID NO: 1383 - DNA, 23 bp, Artificial Sequence
  Synthetic Polynucleotide
cctytaaccgcagcatccatcgg

SEQ ID NO: 1384 - DNA, 23 bp, Artificial Sequence
  Synthetic Polynucleotide
ggtctctygcggtgtggaaaggg

SEQ ID NO: 1385 - DNA, 23 bp, Artificial Sequence
  Synthetic Polynucleotide
ttaycccatctcagtaaccgtgg

SEQ ID NO: 1386 - DNA, 23 bp, Artificial Sequence
  Synthetic Polynucleotide
ttgcygaaggagctgagatgagg

SEQ ID NO: 1387 - DNA, 23 bp, Artificial Sequence
  Synthetic Polynucleotide
ggcaytccgagtctttgacaagg

SEQ ID NO: 1388 - DNA, 23 bp, Artificial Sequence
  Synthetic Polynucleotide
taatccayaatttgtcatcctgg

SEQ ID NO: 1389 - DNA, 23 bp, Artificial Sequence
  Synthetic Polynucleotide
gctytgctttggatggacaatgg

SEQ ID NO: 1390 - DNA, 23 bp, Artificial Sequence
  Synthetic Polynucleotide
tcactcaygttcatgcaatgggg

SEQ ID NO: 1391 - DNA, 23 bp, Artificial Sequence
  Synthetic Polynucleotide
gcaggacygccccattgcctggg

SEQ ID NO: 1392 - DNA, 23 bp, Artificial Sequence
  Synthetic Polynucleotide
tatggyccaagatcgaacgcagg

SEQ ID NO: 1393 - DNA, 23 bp, Artificial Sequence
  Synthetic Polynucleotide
gcccgacygcgggatgctggtgg

SEQ ID NO: 1394 - DNA, 23 bp, Artificial Sequence
  Synthetic Polynucleotide
aaggcyacatgaactaaccaagg

SEQ ID NO: 1395 - DNA, 23 bp, Artificial Sequence
  Synthetic Polynucleotide
caggcgycctcttgctcagccgg

SEQ ID NO: 1396 - DNA, 23 bp, Artificial Sequence
  Synthetic Polynucleotide
cggagtcygttctccagggcagg

SEQ ID NO: 1397 - DNA, 23 bp, Artificial Sequence
  Synthetic Polynucleotide
ctgcyacctagagttgcgctcgg

SEQ ID NO: 1398 - DNA, 23 bp, Artificial Sequence
  Synthetic Polynucleotide
acggctcycatcaactccactgg

SEQ ID NO: 1399 - DNA, 23 bp, Artificial Sequence
  Synthetic Polynucleotide
cggctcycatcaactccactggg

SEQ ID NO: 1400 - DNA, 23 bp, Artificial Sequence
  Synthetic Polynucleotide
ggctcycatcaactccactgggg

SEQ ID NO: 1401 - DNA, 23 bp, Artificial Sequence
  Synthetic Polynucleotide
ggtgcygcggatcggcctgctgg

SEQ ID NO: 1402 - DNA, 23 bp, Artificial Sequence
  Synthetic Polynucleotide
gtgcygcggatcggcctgctggg

SEQ ID NO: 1403 - DNA, 23 bp, Artificial Sequence
  Synthetic Polynucleotide
gtgcygctgttcttaacccacgg

SEQ ID NO: 1404 - DNA, 23 bp, Artificial Sequence
  Synthetic Polynucleotide
tgcygctgttcttaacccacggg

SEQ ID NO: 1405 - DNA, 23 bp, Artificial Sequence
  Synthetic Polynucleotide
gctcatcyccttcagtgacaagg

SEQ ID NO: 1406 - DNA, 23 bp, Artificial Sequence
  Synthetic Polynucleotide
ggggcygtgacgaccagcccagg

SEQ ID NO: 1407 - DNA, 23 bp, Artificial Sequence
  Synthetic Polynucleotide
gtatcygcatgggcgcctgcagg

SEQ ID NO: 1408 - DNA, 23 bp, Artificial Sequence
  Synthetic Polynucleotide
gaaatcayaggacaagcctttgg

SEQ ID NO: 1409 - DNA, 23 bp, Artificial Sequence
  Synthetic Polynucleotide
gagccyccagagcttgttgaagg

SEQ ID NO: 1410 - DNA, 23 bp, Artificial Sequence
  Synthetic Polynucleotide
attgtacycagagcactagaagg

SEQ ID NO: 1411 - DNA, 23 bp, Artificial Sequence
  Synthetic Polynucleotide
aggyaacccttaatactacctgg

SEQ ID NO: 1412 - DNA, 23 bp, Artificial Sequence
  Synthetic Polynucleotide
gaacggygcgcggacccgggcgg

SEQ ID NO: 1413 - DNA, 23 bp, Artificial Sequence
  Synthetic Polynucleotide
aacggygcgcggacccgggcggg

SEQ ID NO: 1414 - DNA, 23 bp, Artificial Sequence
  Synthetic Polynucleotide
acttcygtgagaacaagctcagg

SEQ ID NO: 1415 - DNA, 23 bp, Artificial Sequence
  Synthetic Polynucleotide
caagctytgataccttcagttgg

SEQ ID NO: 1416 - DNA, 23 bp, Artificial Sequence
  Synthetic Polynucleotide
aagctytgataccttcagttggg

SEQ ID NO: 1417 - DNA, 23 bp, Artificial Sequence
  Synthetic Polynucleotide
cctccaygactttttcaaaaagg

SEQ ID NO: 1418 - DNA, 23 bp, Artificial Sequence
  Synthetic Polynucleotide
cgtcygatcaaaggcgccaaagg

SEQ ID NO: 1419 - DNA, 23 bp, Artificial Sequence
  Synthetic Polynucleotide
gtcygatcaaaggcgccaaaggg

SEQ ID NO: 1420 - DNA, 23 bp, Artificial Sequence
  Synthetic Polynucleotide
tactaccyggaccaggtgggtgg

SEQ ID NO: 1421 - DNA, 23 bp, Artificial Sequence
  Synthetic Polynucleotide
actaccyggaccaggtgggtggg

SEQ ID NO: 1422 - DNA, 23 bp, Artificial Sequence
  Synthetic Polynucleotide
ctaccyggaccaggtgggtgggg

SEQ ID NO: 1423 - DNA, 23 bp, Artificial Sequence
  Synthetic Polynucleotide
aggcaytggggacgagatcgagg

SEQ ID NO: 1424 - DNA, 23 bp, Artificial Sequence
  Synthetic Polynucleotide
gtacgtgyctgtgaacggcaagg

SEQ ID NO: 1425 - DNA, 23 bp, Artificial Sequence
  Synthetic Polynucleotide
tacgtgyctgtgaacggcaaggg

SEQ ID NO: 1426 - DNA, 23 bp, Artificial Sequence
  Synthetic Polynucleotide
ccgccygcctgtgaagtggatgg

SEQ ID NO: 1427 - DNA, 23 bp, Artificial Sequence
  Synthetic Polynucleotide
gaatcccyaccctggcatcctgg

SEQ ID NO: 1428 - DNA, 23 bp, Artificial Sequence
  Synthetic Polynucleotide
ggagactyccgctactcagatgg

SEQ ID NO: 1429 - DNA, 23 bp, Artificial Sequence
  Synthetic Polynucleotide
gagactyccgctactcagatggg

SEQ ID NO: 1430 - DNA, 23 bp, Artificial Sequence
  Synthetic Polynucleotide
agccygtacccatggaggtaagg

SEQ ID NO: 1431 - DNA, 23 bp, Artificial Sequence
  Synthetic Polynucleotide
gccygtacccatggaggtaaggg

SEQ ID NO: 1432 - DNA, 23 bp, Artificial Sequence
  Synthetic Polynucleotide
gcagayctgctccttccttcagg

SEQ ID NO: 1433 - DNA, 23 bp, Artificial Sequence
  Synthetic Polynucleotide
ggccacaygtgtcaatgtggtgg

SEQ ID NO: 1434 - DNA, 23 bp, Artificial Sequence
  Synthetic Polynucleotide
gccacaygtgtcaatgtggtggg

SEQ ID NO: 1435 - DNA, 23 bp, Artificial Sequence
  Synthetic Polynucleotide
atggcacygccagtgcaaacagg

SEQ ID NO: 1436 - DNA, 23 bp, Artificial Sequence
  Synthetic Polynucleotide
tgcyctccaagcagcactaccgg

SEQ ID NO: 1437 - DNA, 23 bp, Artificial Sequence
  Synthetic Polynucleotide
ggaccyggcgcgggagccgctgg

SEQ ID NO: 1438 - DNA, 23 bp, Artificial Sequence
  Synthetic Polynucleotide
tttcytctggctagaattgctgg

SEQ ID NO: 1439 - DNA, 23 bp, Artificial Sequence
  Synthetic Polynucleotide
tggacyatggtgagacctccagg

SEQ ID NO: 1440 - DNA, 23 bp, Artificial Sequence
  Synthetic Polynucleotide
caaaggcytcttcttgctggtgg

SEQ ID NO: 1441 - DNA, 23 bp, Artificial Sequence
  Synthetic Polynucleotide
ggcytcttcttgctggtggaagg

SEQ ID NO: 1442 - DNA, 23 bp, Artificial Sequence
  Synthetic Polynucleotide
ccccyactcctattccaccacgg

SEQ ID NO: 1443 - DNA, 23 bp, Artificial Sequence
  Synthetic Polynucleotide
gaagcygccgaagtccctgtcgg

SEQ ID NO: 1444 - DNA, 23 bp, Artificial Sequence
  Synthetic Polynucleotide
ccagygccttccaccaagccagg

SEQ ID NO: 1445 - DNA, 23 bp, Artificial Sequence
  Synthetic Polynucleotide
ggagtycattttggtggacaagg

SEQ ID NO: 1446 - DNA, 23 bp, Artificial Sequence
  Synthetic Polynucleotide
accaagcygctggatcccgaagg

SEQ ID NO: 1447 - DNA, 23 bp, Artificial Sequence
  Synthetic Polynucleotide
aagcygctggatcccgaaggtgg

SEQ ID NO: 1448 - DNA, 23 bp, Artificial Sequence
  Synthetic Polynucleotide
agcygctggatcccgaaggtggg

SEQ ID NO: 1449 - DNA, 23 bp, Artificial Sequence
  Synthetic Polynucleotide
aatgccyccacagtggtcggagg

SEQ ID NO: 1450 - DNA, 23 bp, Artificial Sequence
  Synthetic Polynucleotide
gtggagcyggtagctaaagaagg

SEQ ID NO: 1451 - DNA, 23 bp, Artificial Sequence
  Synthetic Polynucleotide
tggagcyggtagctaaagaaggg

SEQ ID NO: 1452 - DNA, 23 bp, Artificial Sequence
  Synthetic Polynucleotide
ctccagcyggaaggatggcttgg

SEQ ID NO: 1453 - DNA, 23 bp, Artificial Sequence
  Synthetic Polynucleotide
atgccyctgtggctgaggcgtgg

SEQ ID NO: 1454 - DNA, 23 bp, Artificial Sequence
  Synthetic Polynucleotide
tgaggccygtggcctgctcctgg

SEQ ID NO: 1455 - DNA, 23 bp, Artificial Sequence
  Synthetic Polynucleotide
gaggccygtggcctgctcctggg

SEQ ID NO: 1456 - DNA, 23 bp, Artificial Sequence
  Synthetic Polynucleotide
cagcyatggccaggccccagtgg

SEQ ID NO: 1457 - DNA, 23 bp, Artificial Sequence
  Synthetic Polynucleotide
caggyaacatctgtcccagcagg

SEQ ID NO: 1458 - DNA, 23 bp, Artificial Sequence
  Synthetic Polynucleotide
aggyaacatctgtcccagcaggg

SEQ ID NO: 1459 - DNA, 23 bp, Artificial Sequence
  Synthetic Polynucleotide
gagacygaagggccaggtggagg

SEQ ID NO: 1460 - DNA, 23 bp, Artificial Sequence
  Synthetic Polynucleotide
gatgcyggcagggtcctggctgg

SEQ ID NO: 1461 - DNA, 23 bp, Artificial Sequence
  Synthetic Polynucleotide
atgcyggcagggtcctggctggg

SEQ ID NO: 1462 - DNA, 23 bp, Artificial Sequence
  Synthetic Polynucleotide
tgcyggcagggtcctggctgggg

SEQ ID NO: 1463 - DNA, 23 bp, Artificial Sequence
  Synthetic Polynucleotide
ctacyggaccgactctgtcctgg

SEQ ID NO: 1464 - DNA, 23 bp, Artificial Sequence
  Synthetic Polynucleotide
tacyggaccgactctgtcctggg

SEQ ID NO: 1465 - DNA, 23 bp, Artificial Sequence
  Synthetic Polynucleotide
ggcgcttycggggggcctcaggg

SEQ ID NO: 1466 - DNA, 23 bp, Artificial Sequence
  Synthetic Polynucleotide
aaggyaccgcgggcctcgcgcgg

SEQ ID NO: 1467 - DNA, 23 bp, Artificial Sequence
  Synthetic Polynucleotide
aggyaccgcgggcctcgcgcggg

SEQ ID NO: 1468 - DNA, 23 bp, Artificial Sequence
  Synthetic Polynucleotide
ttgcaycattggccgcacactgg

SEQ ID NO: 1469 - DNA, 23 bp, Artificial Sequence
  Synthetic Polynucleotide
cgcgcytgcgcttcgcttcctgg

SEQ ID NO: 1470 - DNA, 23 bp, Artificial Sequence
  Synthetic Polynucleotide
agctcygtttcgtgatgttttgg

SEQ ID NO: 1471 - DNA, 23 bp, Artificial Sequence
  Synthetic Polynucleotide
agttacgycaaggtgatgctggg

SEQ ID NO: 1472 - DNA, 23 bp, Artificial Sequence
  Synthetic Polynucleotide
ggtgygcgggggcgtgctcgagg

SEQ ID NO: 1473 - DNA, 23 bp, Artificial Sequence
  Synthetic Polynucleotide
gtgygcgggggcgtgctcgaggg

SEQ ID NO: 1474 - DNA, 23 bp, Artificial Sequence
  Synthetic Polynucleotide
cgccygcgacaagccacagcagg

SEQ ID NO: 1475 - DNA, 23 bp, Artificial Sequence
  Synthetic Polynucleotide
ctgcaccyccaccagagccatgg

SEQ ID NO: 1476 - DNA, 23 bp, Artificial Sequence
  Synthetic Polynucleotide
agagaycgccaacatgtcactgg

SEQ ID NO: 1477 - DNA, 23 bp, Artificial Sequence
  Synthetic Polynucleotide
gctgcyccagatgccctctgtgg

SEQ ID NO: 1478 - DNA, 23 bp, Artificial Sequence
  Synthetic Polynucleotide
aactcctyctacagcagcaaagg

SEQ ID NO: 1479 - DNA, 23 bp, Artificial Sequence
  Synthetic Polynucleotide
gctgccgygcgtggcccgagggg

SEQ ID NO: 1480 - DNA, 23 bp, Artificial Sequence
  Synthetic Polynucleotide
ctgccgygcgtggcccgaggggg

SEQ ID NO: 1481 - DNA, 23 bp, Artificial Sequence
  Synthetic Polynucleotide
caagttcytccacaaggtgaggg

SEQ ID NO: 1482 - DNA, 23 bp, Artificial Sequence
  Synthetic Polynucleotide
ttcytccacaaggtgagggccgg

SEQ ID NO: 1483 - DNA, 23 bp, Artificial Sequence
  Synthetic Polynucleotide
tgggcgcygcatgcgaggagagg

SEQ ID NO: 1484 - DNA, 23 bp, Artificial Sequence
  Synthetic Polynucleotide
cgcygcatgcgaggagaggctgg

SEQ ID NO: 1485 - DNA, 23 bp, Artificial Sequence
  Synthetic Polynucleotide
tatgacyggcggctggagcccgg

SEQ ID NO: 1486 - DNA, 23 bp, Artificial Sequence
  Synthetic Polynucleotide
gaacgagyctgaaatcatcccgg

SEQ ID NO: 1487 - DNA, 23 bp, Artificial Sequence
  Synthetic Polynucleotide
aaaaaacyctacactctggatgg

SEQ ID NO: 1488 - DNA, 23 bp, Artificial Sequence
  Synthetic Polynucleotide
gatccycgttgtggctgcaaagg

SEQ ID NO: 1489 - DNA, 23 bp, Artificial Sequence
  Synthetic Polynucleotide
ccctgcycacctgcctttcctgg

SEQ ID NO: 1490 - DNA, 23 bp, Artificial Sequence
  Synthetic Polynucleotide
ggaayctttaaaaaaagtgaagg

SEQ ID NO: 1491 - DNA, 23 bp, Artificial Sequence
  Synthetic Polynucleotide
atcacggyaagaatggtacatgg

SEQ ID NO: 1492 - DNA, 23 bp, Artificial Sequence
  Synthetic Polynucleotide
tcacggyaagaatggtacatggg

SEQ ID NO: 1493 - DNA, 23 bp, Artificial Sequence
  Synthetic Polynucleotide
ctatcyttctcagggagggaagg

SEQ ID NO: 1494 - DNA, 23 bp, Artificial Sequence
  Synthetic Polynucleotide
gattgacyggaaggcctacatgg

SEQ ID NO: 1495 - DNA, 23 bp, Artificial Sequence
  Synthetic Polynucleotide
ccacyggcattatcgagacctgg

SEQ ID NO: 1496 - DNA, 23 bp, Artificial Sequence
  Synthetic Polynucleotide
gtacctgyactgggctgactggg

SEQ ID NO: 1497 - DNA, 23 bp, Artificial Sequence
  Synthetic Polynucleotide
ttcctygtatcccaatgctaagg

SEQ ID NO: 1498 - DNA, 23 bp, Artificial Sequence
  Synthetic Polynucleotide
acaaaacytcaatgaaacgtggg

SEQ ID NO: 1499 - DNA, 23 bp, Artificial Sequence
  Synthetic Polynucleotide
gctccyagtggccatgcacgtgg

SEQ ID NO: 1500 - DNA, 23 bp, Artificial Sequence
  Synthetic Polynucleotide
aagatcaytggcaattcagtggg

SEQ ID NO: 1501 - DNA, 23 bp, Artificial Sequence
  Synthetic Polynucleotide
agatcaytggcaattcagtgggg

SEQ ID NO: 1502 - DNA, 23 bp, Artificial Sequence
  Synthetic Polynucleotide
gatcaytggcaattcagtggggg

SEQ ID NO: 1503 - DNA, 23 bp, Artificial Sequence
  Synthetic Polynucleotide
cggyaactaactaactataatgg

SEQ ID NO: 1504 - DNA, 23 bp, Artificial Sequence
  Synthetic Polynucleotide
tcccygtgctgctggagttgtgg

SEQ ID NO: 1505 - DNA, 23 bp, Artificial Sequence
  Synthetic Polynucleotide
cccygtgctgctggagttgtggg

SEQ ID NO: 1506 - DNA, 23 bp, Artificial Sequence
  Synthetic Polynucleotide
ccaacyttttactattcagaagg

SEQ ID NO: 1507 - DNA, 23 bp, Artificial Sequence
  Synthetic Polynucleotide
ccgccygcggggataaagccagg

SEQ ID NO: 1508 - DNA, 23 bp, Artificial Sequence
  Synthetic Polynucleotide
cgccygcggggataaagccaggg

SEQ ID NO: 1509 - DNA, 23 bp, Artificial Sequence
  Synthetic Polynucleotide
gaatctycacagccgctctccgg

SEQ ID NO: 1510 - DNA, 23 bp, Artificial Sequence
  Synthetic Polynucleotide
gatgyctgacgggtagcctgtgg

SEQ ID NO: 1511 - DNA, 23 bp, Artificial Sequence
  Synthetic Polynucleotide
atgyctgacgggtagcctgtggg

SEQ ID NO: 1512 - DNA, 23 bp, Artificial Sequence
  Synthetic Polynucleotide
gctccygggcttcgtggccatgg

SEQ ID NO: 1513 - DNA, 23 bp, Artificial Sequence
  Synthetic Polynucleotide
gtcgcyagggctcgtgtcgctgg

SEQ ID NO: 1514 - DNA, 23 bp, Artificial Sequence
  Synthetic Polynucleotide
tcgcyagggctcgtgtcgctggg

SEQ ID NO: 1515 - DNA, 23 bp, Artificial Sequence
  Synthetic Polynucleotide
ggccgacytctccgtgtcggtgg

SEQ ID NO: 1516 - DNA, 23 bp, Artificial Sequence
  Synthetic Polynucleotide
caaccygcagtttggtgagatgg

SEQ ID NO: 1517 - DNA, 23 bp, Artificial Sequence
  Synthetic Polynucleotide
cgccaccyaccgccgcctgctgg

SEQ ID NO: 1518 - DNA, 23 bp, Artificial Sequence
  Synthetic Polynucleotide
caccyaccgccgcctgctggagg

SEQ ID NO: 1519 - DNA, 23 bp, Artificial Sequence
  Synthetic Polynucleotide
accyaccgccgcctgctggaggg

SEQ ID NO: 1520 - DNA, 23 bp, Artificial Sequence
  Synthetic Polynucleotide
ttgaagyctcccgcggtgagcgg

SEQ ID NO: 1521 - DNA, 23 bp, Artificial Sequence
  Synthetic Polynucleotide
aagyctcccgcggtgagcggcgg

SEQ ID NO: 1522 - DNA, 23 bp, Artificial Sequence
  Synthetic Polynucleotide
tggtcygagcttcgacttcgtgg

SEQ ID NO: 1523 - DNA, 23 bp, Artificial Sequence
  Synthetic Polynucleotide
ccacttcytgaaaagtactgtgg

SEQ ID NO: 1524 - DNA, 23 bp, Artificial Sequence
  Synthetic Polynucleotide
gcaaytgcagaaaatgcaaaagg

SEQ ID NO: 1525 - DNA, 23 bp, Artificial Sequence
  Synthetic Polynucleotide
aagatctygaggcatgacattgg

SEQ ID NO: 1526 - DNA, 23 bp, Artificial Sequence
  Synthetic Polynucleotide
gacycacagagcccaatttctgg

SEQ ID NO: 1527 - DNA, 23 bp, Artificial Sequence
  Synthetic Polynucleotide
tccccatygtcctcagggatggg

SEQ ID NO: 1528 - DNA, 23 bp, Artificial Sequence
  Synthetic Polynucleotide
caacytactgagggctttgaagg

SEQ ID NO: 1529 - DNA, 23 bp, Artificial Sequence
  Synthetic Polynucleotide
gccttccygcccccccatcaggg

SEQ ID NO: 1530 - DNA, 23 bp, Artificial Sequence
  Synthetic Polynucleotide
acactacyacattgccgctgagg

SEQ ID NO: 1531 - DNA, 23 bp, Artificial Sequence
  Synthetic Polynucleotide
gtgcagayacttggaggcaatgg

SEQ ID NO: 1532 - DNA, 23 bp, Artificial Sequence
  Synthetic Polynucleotide
cagcgaygttcagatactagagg

SEQ ID NO: 1533 - DNA, 23 bp, Artificial Sequence
  Synthetic Polynucleotide
atgggcyaagcgaggagcagagg

SEQ ID NO: 1534 - DNA, 23 bp, Artificial Sequence
  Synthetic Polynucleotide
attacgyccagtcctacaaatgg

SEQ ID NO: 1535 - DNA, 23 bp, Artificial Sequence
  Synthetic Polynucleotide
ttacgyccagtcctacaaatggg

SEQ ID NO: 1536 - DNA, 23 bp, Artificial Sequence
  Synthetic Polynucleotide
tacgyccagtcctacaaatgggg

SEQ ID NO: 1537 - DNA, 23 bp, Artificial Sequence
  Synthetic Polynucleotide
cgcccggyacggcatcgcgtggg

SEQ ID NO: 1538 - DNA, 23 bp, Artificial Sequence
  Synthetic Polynucleotide
gcccggyacggcatcgcgtgggg

SEQ ID NO: 1539 - DNA, 23 bp, Artificial Sequence
  Synthetic Polynucleotide
gtttgccyccttcatcgacaagg

SEQ ID NO: 1540 - DNA, 23 bp, Artificial Sequence
  Synthetic Polynucleotide
aaggacaytcctgtccccaaggg

SEQ ID NO: 1541 - DNA, 23 bp, Artificial Sequence
  Synthetic Polynucleotide
gggccygcggcacctggtggtgg

SEQ ID NO: 1542 - DNA, 23 bp, Artificial Sequence
  Synthetic Polynucleotide
gatgaccytgacctcattgctgg

SEQ ID NO: 1543 - DNA, 23 bp, Artificial Sequence
  Synthetic Polynucleotide
ctgyttccctttaggaatctcgg

SEQ ID NO: 1544 - DNA, 23 bp, Artificial Sequence
  Synthetic Polynucleotide
ctcttctygcacagtggaccggg

SEQ ID NO: 1545 - DNA, 23 bp, Artificial Sequence
  Synthetic Polynucleotide
gggacaygttacaacaccgttgg

SEQ ID NO: 1546 - DNA, 23 bp, Artificial Sequence
  Synthetic Polynucleotide
cagctgycctgccagggccgcgg

SEQ ID NO: 1547 - DNA, 23 bp, Artificial Sequence
  Synthetic Polynucleotide
agctgycctgccagggccgcggg

SEQ ID NO: 1548 - DNA, 23 bp, Artificial Sequence
  Synthetic Polynucleotide
gctgycctgccagggccgcgggg

SEQ ID NO: 1549 - DNA, 23 bp, Artificial Sequence
  Synthetic Polynucleotide
ctgycctgccagggccgcggggg

SEQ ID NO: 1550 - DNA, 23 bp, Artificial Sequence
  Synthetic Polynucleotide
tgcygtccaaaggcacctactgg

SEQ ID NO: 1551 - DNA, 23 bp, Artificial Sequence
  Synthetic Polynucleotide
gaaygtccccccaacttcaccgg

SEQ ID NO: 1552 - DNA, 23 bp, Artificial Sequence
  Synthetic Polynucleotide
agggyacctggacgaccccacgg

SEQ ID NO: 1553 - DNA, 23 bp, Artificial Sequence
  Synthetic Polynucleotide
ggaccycgccttccattcggcgg

SEQ ID NO: 1554 - DNA, 23 bp, Artificial Sequence
  Synthetic Polynucleotide
gtccyggaagccattgagccagg

SEQ ID NO: 1555 - DNA, 23 bp, Artificial Sequence
  Synthetic Polynucleotide
ccctcytcaatgctgccaactgg

SEQ ID NO: 1556 - DNA, 23 bp, Artificial Sequence
  Synthetic Polynucleotide
ttccctgytccgggctggccggg

SEQ ID NO: 1557 - DNA, 23 bp, Artificial Sequence
  Synthetic Polynucleotide
agcccaygccaacaatccactgg

SEQ ID NO: 1558 - DNA, 23 bp, Artificial Sequence
  Synthetic Polynucleotide
tgtgytccttctggtcatcgtgg

SEQ ID NO: 1559 - DNA, 23 bp, Artificial Sequence
  Synthetic Polynucleotide
ggcgacycctttgtctttgaagg

SEQ ID NO: 1560 - DNA, 23 bp, Artificial Sequence
  Synthetic Polynucleotide
aatgtacyaccaagaatcaaagg

SEQ ID NO: 1561 - DNA, 23 bp, Artificial Sequence
  Synthetic Polynucleotide
ctggtgcytggggctcctggcgg

SEQ ID NO: 1562 - DNA, 23 bp, Artificial Sequence
  Synthetic Polynucleotide
gagcccaytgaaatacgctcagg

SEQ ID NO: 1563 - DNA, 23 bp, Artificial Sequence
  Synthetic Polynucleotide
attgacycagtcggattcaatgg

SEQ ID NO: 1564 - DNA, 23 bp, Artificial Sequence
  Synthetic Polynucleotide
tgcggcygaggtaggtggtctgg

SEQ ID NO: 1565 - DNA, 23 bp, Artificial Sequence
  Synthetic Polynucleotide
gcggcygaggtaggtggtctggg

SEQ ID NO: 1566 - DNA, 23 bp, Artificial Sequence
  Synthetic Polynucleotide
gacttctyggccctggatcttgg

SEQ ID NO: 1567 - DNA, 23 bp, Artificial Sequence
  Synthetic Polynucleotide
ttctyggccctggatcttggagg

SEQ ID NO: 1568 - DNA, 23 bp, Artificial Sequence
  Synthetic Polynucleotide
agcyccagaagcctttcttttgg

SEQ ID NO: 1569 - DNA, 23 bp, Artificial Sequence
  Synthetic Polynucleotide
tggagygcattgagtagggccgg

SEQ ID NO: 1570 - DNA, 23 bp, Artificial Sequence
  Synthetic Polynucleotide
ggaccygctcaatgtcaagctgg

SEQ ID NO: 1571 - DNA, 23 bp, Artificial Sequence
  Synthetic Polynucleotide
taccaggygtccctgaattctgg

SEQ ID NO: 1572 - DNA, 23 bp, Artificial Sequence
  Synthetic Polynucleotide
aaagaayctgtagatcaaagagg

SEQ ID NO: 1573 - DNA, 23 bp, Artificial Sequence
  Synthetic Polynucleotide
acgaacaycttcctcaaatttgg

SEQ ID NO: 1574 - DNA, 23 bp, Artificial Sequence
  Synthetic Polynucleotide
gacgtyctctgagaggacgctgg

SEQ ID NO: 1575 - DNA, 23 bp, Artificial Sequence
  Synthetic Polynucleotide
gaagcyggaggcgcaggtgcagg

SEQ ID NO: 1576 - DNA, 23 bp, Artificial Sequence
  Synthetic Polynucleotide
caaaccyatatccgcagagttgg

SEQ ID NO: 1577 - DNA, 23 bp, Artificial Sequence
  Synthetic Polynucleotide
tggccttycctggccccaggtgg

SEQ ID NO: 1578 - DNA, 23 bp, Artificial Sequence
  Synthetic Polynucleotide
ggccttycctggccccaggtggg

SEQ ID NO: 1579 - DNA, 23 bp, Artificial Sequence
  Synthetic Polynucleotide
gacttcaytgaggaccagggtgg

SEQ ID NO: 1580 - DNA, 23 bp, Artificial Sequence
  Synthetic Polynucleotide
acttcaytgaggaccagggtggg

SEQ ID NO: 1581 - DNA, 23 bp, Artificial Sequence
  Synthetic Polynucleotide
cttcygggccgggaccgtgatgg

SEQ ID NO: 1582 - DNA, 23 bp, Artificial Sequence
  Synthetic Polynucleotide
ttcygggccgggaccgtgatggg

SEQ ID NO: 1583 - DNA, 23 bp, Artificial Sequence
  Synthetic Polynucleotide
cagccygatccccatcactgtgg

SEQ ID NO: 1584 - DNA, 23 bp, Artificial Sequence
  Synthetic Polynucleotide
gccyctaccctgggctcatctgg

SEQ ID NO: 1585 - DNA, 23 bp, Artificial Sequence
  Synthetic Polynucleotide
tctcacygctagaaaagacttgg

SEQ ID NO: 1586 - DNA, 23 bp, Artificial Sequence
  Synthetic Polynucleotide
gggcagygtacttgccgcactgg

SEQ ID NO: 1587 - DNA, 23 bp, Artificial Sequence
  Synthetic Polynucleotide
gagtyctttgcccttttgagagg

SEQ ID NO: 1588 - DNA, 23 bp, Artificial Sequence
  Synthetic Polynucleotide
ccgccgcyattaccccggccagg

SEQ ID NO: 1589 - DNA, 23 bp, Artificial Sequence
  Synthetic Polynucleotide
cgccgcyattaccccggccaggg

SEQ ID NO: 1590 - DNA, 23 bp, Artificial Sequence
  Synthetic Polynucleotide
ccaaaacycacctttcctggtgg

SEQ ID NO: 1591 - DNA, 23 bp, Artificial Sequence
  Synthetic Polynucleotide
ggaccagyacatgaggactgggg

SEQ ID NO: 1592 - DNA, 23 bp, Artificial Sequence
  Synthetic Polynucleotide
ccagyacatgaggactggggagg

SEQ ID NO: 1593 - DNA, 23 bp, Artificial Sequence
  Synthetic Polynucleotide
cagyacatgaggactggggaggg

SEQ ID NO: 1594 - DNA, 23 bp, Artificial Sequence
  Synthetic Polynucleotide
cagcagcygcaggagcacctggg

SEQ ID NO: 1595 - DNA, 23 bp, Artificial Sequence
  Synthetic Polynucleotide
tgccatcycactggcgtacgagg

SEQ ID NO: 1596 - DNA, 23 bp, Artificial Sequence
  Synthetic Polynucleotide
aggacyctgagccaggggcccgg

SEQ ID NO: 1597 - DNA, 23 bp, Artificial Sequence
  Synthetic Polynucleotide
ggccgcygcccaacgccatccgg

SEQ ID NO: 1598 - DNA, 23 bp, Artificial Sequence
  Synthetic Polynucleotide
tgcacytgccgtgggtgcagagg

SEQ ID NO: 1599 - DNA, 23 bp, Artificial Sequence
  Synthetic Polynucleotide
agcgcycctcagcatctgccagg

SEQ ID NO: 1600 - DNA, 23 bp, Artificial Sequence
  Synthetic Polynucleotide
accacygggggtaaaaaaagggg

SEQ ID NO: 1601 - DNA, 23 bp, Artificial Sequence
  Synthetic Polynucleotide
taccacygggggtaaaaaaaggg

SEQ ID NO: 1602 - DNA, 23 bp, Artificial Sequence
  Synthetic Polynucleotide
ataccacygggggtaaaaaaagg

SEQ ID NO: 1603 - DNA, 23 bp, Artificial Sequence
  Synthetic Polynucleotide
ccctyctcggagccctgtagagg

SEQ ID NO: 1604 - DNA, 23 bp, Artificial Sequence
  Synthetic Polynucleotide
ttcycctccacgctctcgcctgg

SEQ ID NO: 1605 - DNA, 23 bp, Artificial Sequence
  Synthetic Polynucleotide
gcccctyggagcccacgcagagg

SEQ ID NO: 1606 - DNA, 23 bp, Artificial Sequence
  Synthetic Polynucleotide
ttctcyaaaagcttctgataagg

SEQ ID NO: 1607 - DNA, 23 bp, Artificial Sequence
  Synthetic Polynucleotide
attgycgtcgtcgtcgtcgcagg

SEQ ID NO: 1608 - DNA, 23 bp, Artificial Sequence
  Synthetic Polynucleotide
gtacygtaaggaagattctcggg

SEQ ID NO: 1609 - DNA, 23 bp, Artificial Sequence
  Synthetic Polynucleotide
ggtacygtaaggaagattctcgg

SEQ ID NO: 1610 - DNA, 23 bp, Artificial Sequence
  Synthetic Polynucleotide
tccyggtctgaccattccccagg

SEQ ID NO: 1611 - DNA, 23 bp, Artificial Sequence
  Synthetic Polynucleotide
actcaycaatatctgcaaaatgg

SEQ ID NO: 1612 - DNA, 23 bp, Artificial Sequence
  Synthetic Polynucleotide
gaatagyccatcgcagagcaagg

SEQ ID NO: 1613 - DNA, 23 bp, Artificial Sequence
  Synthetic Polynucleotide
agtccacytggggaggaaggtgg

SEQ ID NO: 1614 - DNA, 23 bp, Artificial Sequence
  Synthetic Polynucleotide
attcacaytcttcaacttaatgg

SEQ ID NO: 1615 - DNA, 23 bp, Artificial Sequence
  Synthetic Polynucleotide
tgttcayactggaagccggcggg

SEQ ID NO: 1616 - DNA, 23 bp, Artificial Sequence
  Synthetic Polynucleotide
ctgttcayactggaagccggcgg

SEQ ID NO: 1617 - DNA, 23 bp, Artificial Sequence
  Synthetic Polynucleotide
gcaytgaccaccacctcaagtgg

SEQ ID NO: 1618 - DNA, 23 bp, Artificial Sequence
  Synthetic Polynucleotide
cggagyccttccacagccgctgg

SEQ ID NO: 1619 - DNA, 23 bp, Artificial Sequence
  Synthetic Polynucleotide
ggatgyacctgaggacaggcagg

SEQ ID NO: 1620 - DNA, 23 bp, Artificial Sequence
  Synthetic Polynucleotide
gacacygaggtgctgagtacggg

SEQ ID NO: 1621 - DNA, 23 bp, Artificial Sequence
  Synthetic Polynucleotide
cgacacygaggtgctgagtacgg

SEQ ID NO: 1622 - DNA, 23 bp, Artificial Sequence
  Synthetic Polynucleotide
tgccgyacccgatcatacctggg

SEQ ID NO: 1623 - DNA, 23 bp, Artificial Sequence
  Synthetic Polynucleotide
atgccgyacccgatcatacctgg

SEQ ID NO: 1624 - DNA, 23 bp, Artificial Sequence
  Synthetic Polynucleotide
gacayacccctgggtggtggagg

SEQ ID NO: 1625 - DNA, 23 bp, Artificial Sequence
  Synthetic Polynucleotide
gcggacayacccctgggtggtgg

SEQ ID NO: 1626 - DNA, 23 bp, Artificial Sequence
  Synthetic Polynucleotide
gtagyagcaggagatcatcgtgg

SEQ ID NO: 1627 - DNA, 23 bp, Artificial Sequence
  Synthetic Polynucleotide
atatytgcatgttttctccaagg

SEQ ID NO: 1628 - DNA, 23 bp, Artificial Sequence
  Synthetic Polynucleotide
ccaygtcagtctctgtcctccgg

SEQ ID NO: 1629 - DNA, 23 bp, Artificial Sequence
  Synthetic Polynucleotide
ctccygagggcttaggattgggg

SEQ ID NO: 1630 - DNA, 23 bp, Artificial Sequence
  Synthetic Polynucleotide
cctccygagggcttaggattggg

SEQ ID NO: 1631 - DNA, 23 bp, Artificial Sequence
  Synthetic Polynucleotide
acctccygagggcttaggattgg

SEQ ID NO: 1632 - DNA, 23 bp, Artificial Sequence
  Synthetic Polynucleotide
tcctacayagtggtactcagagg

SEQ ID NO: 1633 - DNA, 23 bp, Artificial Sequence
  Synthetic Polynucleotide
ctgyactggcagagggattctgg

SEQ ID NO: 1634 - DNA, 23 bp, Artificial Sequence
  Synthetic Polynucleotide
gcgyttccacgatgaagaagggg

SEQ ID NO: 1635 - DNA, 23 bp, Artificial Sequence
  Synthetic Polynucleotide
agcgyttccacgatgaagaaggg

SEQ ID NO: 1636 - DNA, 23 bp, Artificial Sequence
  Synthetic Polynucleotide
cagcgyttccacgatgaagaagg

SEQ ID NO: 1637 - DNA, 23 bp, Artificial Sequence
  Synthetic Polynucleotide
agttgtcycaatacctgctttgg

SEQ ID NO: 1638 - DNA, 23 bp, Artificial Sequence
  Synthetic Polynucleotide
atayctccaacctcaaacttggg

SEQ ID NO: 1639 - DNA, 23 bp, Artificial Sequence
  Synthetic Polynucleotide
gatayctccaacctcaaacttgg

SEQ ID NO: 1640 - DNA, 23 bp, Artificial Sequence
  Synthetic Polynucleotide
ggcactycttggcatagcgacgg

SEQ ID NO: 1641 - DNA, 23 bp, Artificial Sequence
  Synthetic Polynucleotide
gcggtcaytgaggttctgcatgg

SEQ ID NO: 1642 - DNA, 23 bp, Artificial Sequence
  Synthetic Polynucleotide
ctgctgcygtcgtcgtcgcttgg

SEQ ID NO: 1643 - DNA, 23 bp, Artificial Sequence
  Synthetic Polynucleotide
cctycttcacctgcttgaggtgg

SEQ ID NO: 1644 - DNA, 23 bp, Artificial Sequence
  Synthetic Polynucleotide
cctcctycttcacctgcttgagg

SEQ ID NO: 1645 - DNA, 23 bp, Artificial Sequence
  Synthetic Polynucleotide
gtcctgyccctccgccacagtgg

SEQ ID NO: 1646 - DNA, 23 bp, Artificial Sequence
  Synthetic Polynucleotide
gtgccayacctggtgtggggagg

SEQ ID NO: 1647 - DNA, 23 bp, Artificial Sequence
  Synthetic Polynucleotide
aaagactyttcccaccgacatgg

SEQ ID NO: 1648 - DNA, 23 bp, Artificial Sequence
  Synthetic Polynucleotide
tggygcctcatgcagcgtcgagg

SEQ ID NO: 1649 - DNA, 23 bp, Artificial Sequence
  Synthetic Polynucleotide
aagcycttaatatctgtgcatgg

SEQ ID NO: 1650 - DNA, 23 bp, Artificial Sequence
  Synthetic Polynucleotide
taaacygcagagagaaccaaggg

SEQ ID NO: 1651 - DNA, 23 bp, Artificial Sequence
  Synthetic Polynucleotide
gtaaacygcagagagaaccaagg

SEQ ID NO: 1652 - DNA, 23 bp, Artificial Sequence
  Synthetic Polynucleotide
cccacayatccatctgcctgcgg

SEQ ID NO: 1653 - DNA, 23 bp, Artificial Sequence
  Synthetic Polynucleotide
cacccaycttcttcacccctcgg

SEQ ID NO: 1654 - DNA, 23 bp, Artificial Sequence
  Synthetic Polynucleotide
atccattycaaagtaagcaatgg

SEQ ID NO: 1655 - DNA, 23 bp, Artificial Sequence
  Synthetic Polynucleotide
gggccyggcccgcacgtcacagg

SEQ ID NO: 1656 - DNA, 23 bp, Artificial Sequence
  Synthetic Polynucleotide
cgtcygtacgtgggcggcctggg

SEQ ID NO: 1657 - DNA, 23 bp, Artificial Sequence
  Synthetic Polynucleotide
gcgtcygtacgtgggcggcctgg

SEQ ID NO: 1658 - DNA, 23 bp, Artificial Sequence
  Synthetic Polynucleotide
cgcccygcggccgagagggcggg

SEQ ID NO: 1659 - DNA, 23 bp, Artificial Sequence
  Synthetic Polynucleotide
gcgcccygcggccgagagggcgg

SEQ ID NO: 1660 - DNA, 23 bp, Artificial Sequence
  Synthetic Polynucleotide
gttcayagatgtcaaggttctgg

SEQ ID NO: 1661 - DNA, 23 bp, Artificial Sequence
  Synthetic Polynucleotide
ggcayacagctctttggataagg

SEQ ID NO: 1662 - DNA, 23 bp, Artificial Sequence
  Synthetic Polynucleotide
gagcatyctctgtttcaaagagg

SEQ ID NO: 1663 - DNA, 23 bp, Artificial Sequence
  Synthetic Polynucleotide
ggcagcaytgcactgacaggcgg

SEQ ID NO: 1664 - DNA, 23 bp, Artificial Sequence
  Synthetic Polynucleotide
aaggactycccttgcaataaagg

SEQ ID NO: 1665 - DNA, 23 bp, Artificial Sequence
  Synthetic Polynucleotide
gactycagatgtaactcttatgg

SEQ ID NO: 1666 - DNA, 23 bp, Artificial Sequence
  Synthetic Polynucleotide
gactcyagctatatcttcacagg

SEQ ID NO: 1667 - DNA, 23 bp, Artificial Sequence
  Synthetic Polynucleotide
ttccacayccacatcaccattgg

SEQ ID NO: 1668 - DNA, 23 bp, Artificial Sequence
  Synthetic Polynucleotide
atcytctctgagttggtgttggg

SEQ ID NO: 1669 - DNA, 23 bp, Artificial Sequence
  Synthetic Polynucleotide
gatcytctctgagttggtgttgg

SEQ ID NO: 1670 - DNA, 23 bp, Artificial Sequence
  Synthetic Polynucleotide
aacctcgycttccaagtggctgg

SEQ ID NO: 1671 - DNA, 23 bp, Artificial Sequence
  Synthetic Polynucleotide
ccccctycttttgggctcgctgg

SEQ ID NO: 1672 - DNA, 23 bp, Artificial Sequence
  Synthetic Polynucleotide
gccgccgytttggctggcacggg

SEQ ID NO: 1673 - DNA, 23 bp, Artificial Sequence
  Synthetic Polynucleotide
tgggcygttccaagacaccaggg

SEQ ID NO: 1674 - DNA, 23 bp, Artificial Sequence
  Synthetic Polynucleotide
gtgggcygttccaagacaccagg

SEQ ID NO: 1675 - DNA, 23 bp, Artificial Sequence
  Synthetic Polynucleotide
cactgcgyaggtggtgaccccgg

SEQ ID NO: 1676 - DNA, 23 bp, Artificial Sequence
  Synthetic Polynucleotide
gtctyctactcggttcaggcggg

SEQ ID NO: 1677 - DNA, 23 bp, Artificial Sequence
  Synthetic Polynucleotide
tgtctyctactcggttcaggcgg

SEQ ID NO: 1678 - DNA, 23 bp, Artificial Sequence
  Synthetic Polynucleotide
aggyctgtggagtgcaggagagg

SEQ ID NO: 1679 - DNA, 23 bp, Artificial Sequence
  Synthetic Polynucleotide
gccygcagtggagagaggagagg

SEQ ID NO: 1680 - DNA, 23 bp, Artificial Sequence
  Synthetic Polynucleotide
ccgcccyggagacacgaagctgg

SEQ ID NO: 1681 - DNA, 23 bp, Artificial Sequence
  Synthetic Polynucleotide
accygtcgagataatgggtcagg

SEQ ID NO: 1682 - DNA, 23 bp, Artificial Sequence
  Synthetic Polynucleotide
cctctgycatgaagatgtcctgg

SEQ ID NO: 1683 - DNA, 23 bp, Artificial Sequence
  Synthetic Polynucleotide
ctcctgyccccgctccacggtgg

SEQ ID NO: 1684 - DNA, 23 bp, Artificial Sequence
  Synthetic Polynucleotide
gcaygacactgcaggggggtggg

SEQ ID NO: 1685 - DNA, 23 bp, Artificial Sequence
  Synthetic Polynucleotide
cgcaygacactgcaggggggtgg

SEQ ID NO: 1686 - DNA, 23 bp, Artificial Sequence
  Synthetic Polynucleotide
aaccgcaygacactgcagggggg

SEQ ID NO: 1687 - DNA, 23 bp, Artificial Sequence
  Synthetic Polynucleotide
gacycccgtgaaatgattcccgg

SEQ ID NO: 1688 - DNA, 23 bp, Artificial Sequence
  Synthetic Polynucleotide
tcaaccycaccctgtacttcagg

SEQ ID NO: 1689 - DNA, 23 bp, Artificial Sequence
  Synthetic Polynucleotide
gggcyttattccatctctctcgg

SEQ ID NO: 1690 - DNA, 23 bp, Artificial Sequence
  Synthetic Polynucleotide
caggyccagatcgaaatcccggg

SEQ ID NO: 1691 - DNA, 23 bp, Artificial Sequence
  Synthetic Polynucleotide
ccaggyccagatcgaaatcccgg

SEQ ID NO: 1692 - DNA, 23 bp, Artificial Sequence
  Synthetic Polynucleotide
tacttgcygtagaacagaagggg

SEQ ID NO: 1693 - DNA, 23 bp, Artificial Sequence
  Synthetic Polynucleotide
gtcccygtgtcccgcagtctagg

SEQ ID NO: 1694 - DNA, 23 bp, Artificial Sequence
  Synthetic Polynucleotide
tatcaaygaactgtccctcaggg

SEQ ID NO: 1695 - DNA, 23 bp, Artificial Sequence
  Synthetic Polynucleotide
ctatcaaygaactgtccctcagg

SEQ ID NO: 1696 - DNA, 23 bp, Artificial Sequence
  Synthetic Polynucleotide
atgacgyggcctgaatcacaggg

SEQ ID NO: 1697 - DNA, 23 bp, Artificial Sequence
  Synthetic Polynucleotide
aatgacgyggcctgaatcacagg

SEQ ID NO: 1698 - DNA, 23 bp, Artificial Sequence
  Synthetic Polynucleotide
atatccygggggagcagaaaggg

SEQ ID NO: 1699 - DNA, 23 bp, Artificial Sequence
  Synthetic Polynucleotide
gatatccygggggagcagaaagg

SEQ ID NO: 1700 - DNA, 23 bp, Artificial Sequence
  Synthetic Polynucleotide
cagcccaytgataattgggatgg

SEQ ID NO: 1701 - DNA, 23 bp, Artificial Sequence
  Synthetic Polynucleotide
atcyatcaaatacaaaaatttgg

SEQ ID NO: 1702 - DNA, 23 bp, Artificial Sequence
  Synthetic Polynucleotide
cagctcygagaagaaaccacggg

SEQ ID NO: 1703 - DNA, 23 bp, Artificial Sequence
  Synthetic Polynucleotide
tcagctcygagaagaaaccacgg

SEQ ID NO: 1704 - DNA, 23 bp, Artificial Sequence
  Synthetic Polynucleotide
cttcytgctgcggtccccaatgg

SEQ ID NO: 1705 - DNA, 23 bp, Artificial Sequence
  Synthetic Polynucleotide
ttcccygtaagaaaattaacagg

SEQ ID NO: 1706 - DNA, 23 bp, Artificial Sequence
  Synthetic Polynucleotide
gcaccayggctgcgggtcgaggg

SEQ ID NO: 1707 - DNA, 23 bp, Artificial Sequence
  Synthetic Polynucleotide
ggcaccayggctgcgggtcgagg

SEQ ID NO: 1708 - DNA, 23 bp, Artificial Sequence
  Synthetic Polynucleotide
tggcytgtcacccggatatgtgg

SEQ ID NO: 1709 - DNA, 23 bp, Artificial Sequence
  Synthetic Polynucleotide
gaccygcaggcaggagaaggggg

SEQ ID NO: 1710 - DNA, 23 bp, Artificial Sequence
  Synthetic Polynucleotide
tgaccygcaggcaggagaagggg

SEQ ID NO: 1711 - DNA, 23 bp, Artificial Sequence
  Synthetic Polynucleotide
ctgaccygcaggcaggagaaggg

SEQ ID NO: 1712 - DNA, 23 bp, Artificial Sequence
  Synthetic Polynucleotide
gctgaccygcaggcaggagaagg

SEQ ID NO: 1713 - DNA, 23 bp, Artificial Sequence
  Synthetic Polynucleotide
ggaacaygcactcctcttccagg

SEQ ID NO: 1714 - DNA, 23 bp, Artificial Sequence
  Synthetic Polynucleotide
tccygtcatcactctttttgtgg

SEQ ID NO: 1715 - DNA, 23 bp, Artificial Sequence
  Synthetic Polynucleotide
gcggtcaytgaggttctgcatgg

SEQ ID NO: 1716 - DNA, 23 bp, Artificial Sequence
  Synthetic Polynucleotide
aatcytggccccatagcagatgg

SEQ ID NO: 1717 - DNA, 23 bp, Artificial Sequence
  Synthetic Polynucleotide
tccactycttctggctttctggg

SEQ ID NO: 1718 - DNA, 23 bp, Artificial Sequence
  Synthetic Polynucleotide
atccactycttctggctttctgg

SEQ ID NO: 1719 - DNA, 23 bp, Artificial Sequence
  Synthetic Polynucleotide
actttcygttttctgcctctggg

SEQ ID NO: 1720 - DNA, 23 bp, Artificial Sequence
  Synthetic Polynucleotide
cactttcygttttctgcctctgg

SEQ ID NO: 1721 - DNA, 23 bp, Artificial Sequence
  Synthetic Polynucleotide
ggtggyactggaaggggaagtgg

SEQ ID NO: 1722 - DNA, 23 bp, Artificial Sequence
  Synthetic Polynucleotide
ttgycctctgtccaggcatctgg

SEQ ID NO: 1723 - DNA, 23 bp, Artificial Sequence
  Synthetic Polynucleotide
cgcyctcgtaccctgtgctgtgg

SEQ ID NO: 1724 - DNA, 23 bp, Artificial Sequence
  Synthetic Polynucleotide
gtggygcccgaggtgcccattgg

SEQ ID NO: 1725 - DNA, 23 bp, Artificial Sequence
  Synthetic Polynucleotide
ttayacaaaacaatgttgagtgg

SEQ ID NO: 1726 - DNA, 23 bp, Artificial Sequence
  Synthetic Polynucleotide
acaatyccagctggctgggctgg

SEQ ID NO: 1727 - DNA, 23 bp, Artificial Sequence
  Synthetic Polynucleotide
cggytctggaaccagacctgggg

SEQ ID NO: 1728 - DNA, 23 bp, Artificial Sequence
  Synthetic Polynucleotide
gcggytctggaaccagacctggg

SEQ ID NO: 1729 - DNA, 23 bp, Artificial Sequence
  Synthetic Polynucleotide
tgcggytctggaaccagacctgg

SEQ ID NO: 1730 - DNA, 23 bp, Artificial Sequence
  Synthetic Polynucleotide
cccayggctgcggctggcggcgg

SEQ ID NO: 1731 - DNA, 23 bp, Artificial Sequence
  Synthetic Polynucleotide
cggcccayggctgcggctggcgg

SEQ ID NO: 1732 - DNA, 23 bp, Artificial Sequence
  Synthetic Polynucleotide
aagtcayagtgcacggcacaagg

SEQ ID NO: 1733 - DNA, 23 bp, Artificial Sequence
  Synthetic Polynucleotide
aagcygctctgagggctcccagg

SEQ ID NO: 1734 - DNA, 23 bp, Artificial Sequence
  Synthetic Polynucleotide
gtgygatcatgtaatggcgccgg

SEQ ID NO: 1735 - DNA, 23 bp, Artificial Sequence
  Synthetic Polynucleotide
cctgaccytgtcggagctccggg

SEQ ID NO: 1736 - DNA, 23 bp, Artificial Sequence
  Synthetic Polynucleotide
gccacacyctctgccttgcccgg

SEQ ID NO: 1737 - DNA, 23 bp, Artificial Sequence
  Synthetic Polynucleotide
gggtcygcatttgtccgtggagg

SEQ ID NO: 1738 - DNA, 23 bp, Artificial Sequence
  Synthetic Polynucleotide
cgctctyggcaaagaacgctggg

SEQ ID NO: 1739 - DNA, 23 bp, Artificial Sequence
  Synthetic Polynucleotide
gcgctctyggcaaagaacgctgg

SEQ ID NO: 1740 - DNA, 23 bp, Artificial Sequence
  Synthetic Polynucleotide
agactttyctgcttaaagaaggg

SEQ ID NO: 1741 - DNA, 23 bp, Artificial Sequence
  Synthetic Polynucleotide
ccttttcytgtgtatttgattgg

SEQ ID NO: 1742 - DNA, 23 bp, Artificial Sequence
  Synthetic Polynucleotide
gacacgyctgtgtagtgcacagg

SEQ ID NO: 1743 - DNA, 23 bp, Artificial Sequence
  Synthetic Polynucleotide
actycttctctttctcctgaggg

SEQ ID NO: 1744 - DNA, 23 bp, Artificial Sequence
  Synthetic Polynucleotide
tactycttctctttctcctgagg

SEQ ID NO: 1745 - DNA, 23 bp, Artificial Sequence
  Synthetic Polynucleotide
gcccayagtgtccagagacctgg

SEQ ID NO: 1746 - DNA, 23 bp, Artificial Sequence
  Synthetic Polynucleotide
ataycaccacacacaggtaacgg

SEQ ID NO: 1747 - DNA, 23 bp, Artificial Sequence
  Synthetic Polynucleotide
tggytgcacagacagtacgtggg

SEQ ID NO: 1748 - DNA, 23 bp, Artificial Sequence
  Synthetic Polynucleotide
ctggytgcacagacagtacgtgg

SEQ ID NO: 1749 - DNA, 23 bp, Artificial Sequence
  Synthetic Polynucleotide
gatcaycttcatgtagggcaggg

SEQ ID NO: 1750 - DNA, 23 bp, Artificial Sequence
  Synthetic Polynucleotide
agatcaycttcatgtagggcagg

SEQ ID NO: 1751 - DNA, 23 bp, Artificial Sequence
  Synthetic Polynucleotide
ccayccaaccctaagagaagagg

SEQ ID NO: 1752 - DNA, 23 bp, Artificial Sequence
  Synthetic Polynucleotide
tgaccgygatctgcagagaaggg

SEQ ID NO: 1753 - DNA, 23 bp, Artificial Sequence
  Synthetic Polynucleotide
ctgaccgygatctgcagagaagg

SEQ ID NO: 1754 - DNA, 23 bp, Artificial Sequence
  Synthetic Polynucleotide
gctcaygaagaagatgttctggg

SEQ ID NO: 1755 - DNA, 23 bp, Artificial Sequence
  Synthetic Polynucleotide
tgctcaygaagaagatgttctgg

SEQ ID NO: 1756 - DNA, 23 bp, Artificial Sequence
  Synthetic Polynucleotide
caacyccactttagagcgaaagg

SEQ ID NO: 1757 - DNA, 23 bp, Artificial Sequence
  Synthetic Polynucleotide
cccactyggctcaagaccaatgg

SEQ ID NO: 1758 - DNA, 23 bp, Artificial Sequence
  Synthetic Polynucleotide
ctgcyctccacgtcgccccgggg

SEQ ID NO: 1759 - DNA, 23 bp, Artificial Sequence
  Synthetic Polynucleotide
cctgcyctccacgtcgccccggg

SEQ ID NO: 1760 - DNA, 23 bp, Artificial Sequence
  Synthetic Polynucleotide
gcctgcyctccacgtcgccccgg

SEQ ID NO: 1761 - DNA, 23 bp, Artificial Sequence
  Synthetic Polynucleotide
ggaccygcacccggggaaggcgg

SEQ ID NO: 1762 - DNA, 23 bp, Artificial Sequence
  Synthetic Polynucleotide
agagctayagtgttcctaaaagg

SEQ ID NO: 1763 - DNA, 23 bp, Artificial Sequence
  Synthetic Polynucleotide
tgaatycctaaggaagagactgg

SEQ ID NO: 1764 - DNA, 23 bp, Artificial Sequence
  Synthetic Polynucleotide
agcygcaggggcacagggatggg

SEQ ID NO: 1765 - DNA, 23 bp, Artificial Sequence
  Synthetic Polynucleotide
aagcygcaggggcacagggatgg

SEQ ID NO: 1766 - DNA, 23 bp, Artificial Sequence
  Synthetic Polynucleotide
agaatctycaatagacacatcgg

SEQ ID NO: 1767 - DNA, 23 bp, Artificial Sequence
  Synthetic Polynucleotide
atcytgtcatcatcatcaaaggg

SEQ ID NO: 1768 - DNA, 23 bp, Artificial Sequence
  Synthetic Polynucleotide
gatcytgtcatcatcatcaaagg

SEQ ID NO: 1769 - DNA, 23 bp, Artificial Sequence
  Synthetic Polynucleotide
tcatcygtttgcctgctaagcgg

SEQ ID NO: 1770 - DNA, 23 bp, Artificial Sequence
  Synthetic Polynucleotide
ccgacyccaccttgggcagctgg

SEQ ID NO: 1771 - DNA, 23 bp, Artificial Sequence
  Synthetic Polynucleotide
attcayatctgcctccatgttgg

SEQ ID NO: 1772 - DNA, 23 bp, Artificial Sequence
  Synthetic Polynucleotide
attcaccyaccgacaaggatagg

SEQ ID NO: 1773 - DNA, 23 bp, Artificial Sequence
  Synthetic Polynucleotide
gaagtcgytgtcaaacaggaagg

SEQ ID NO: 1774 - DNA, 23 bp, Artificial Sequence
  Synthetic Polynucleotide
tgacctyactgggtggtgacggg

SEQ ID NO: 1775 - DNA, 23 bp, Artificial Sequence
  Synthetic Polynucleotide
atgacctyactgggtggtgacgg

SEQ ID NO: 1776 - DNA, 23 bp, Artificial Sequence
  Synthetic Polynucleotide
cagcygccaatggttccagttgg

SEQ ID NO: 1777 - DNA, 23 bp, Artificial Sequence
  Synthetic Polynucleotide
cctccyccccagactgaagccgg

SEQ ID NO: 1778 - DNA, 23 bp, Artificial Sequence
  Synthetic Polynucleotide
caccytggggacaccaggtcggg

SEQ ID NO: 1779 - DNA, 23 bp, Artificial Sequence
  Synthetic Polynucleotide
tcaccytggggacaccaggtcgg

SEQ ID NO: 1780 - DNA, 23 bp, Artificial Sequence
  Synthetic Polynucleotide
ccaactyacgagccacctacagg

SEQ ID NO: 1781 - DNA, 23 bp, Artificial Sequence
  Synthetic Polynucleotide
atcyctcagcaaactcagcacgg

SEQ ID NO: 1782 - DNA, 23 bp, Artificial Sequence
  Synthetic Polynucleotide
cctcyctcaccacgttgcccagg

SEQ ID NO: 1783 - DNA, 23 bp, Artificial Sequence
  Synthetic Polynucleotide
ataggcayagatattgtcccagg

SEQ ID NO: 1784 - DNA, 23 bp, Artificial Sequence
  Synthetic Polynucleotide
gctgyggcaacagaggccttcgg

SEQ ID NO: 1785 - DNA, 23 bp, Artificial Sequence
  Synthetic Polynucleotide
acttaycctggggagaaggatgg

SEQ ID NO: 1786 - DNA, 23 bp, Artificial Sequence
  Synthetic Polynucleotide
agaaycattcttgatgtctctgg

SEQ ID NO: 1787 - DNA, 23 bp, Artificial Sequence
  Synthetic Polynucleotide
gttcytaccacttaaagacgagg

SEQ ID NO: 1788 - DNA, 23 bp, Artificial Sequence
  Synthetic Polynucleotide
ttcttcgyggactgcaaacaagg

SEQ ID NO: 1789 - DNA, 23 bp, Artificial Sequence
  Synthetic Polynucleotide
agcaacygcagaaaaaagagggg

SEQ ID NO: 1790 - DNA, 23 bp, Artificial Sequence
  Synthetic Polynucleotide
cagcaacygcagaaaaaagaggg

SEQ ID NO: 1791 - DNA, 23 bp, Artificial Sequence
  Synthetic Polynucleotide
ccaccygaggcaggggcggcagg

SEQ ID NO: 1792 - DNA, 23 bp, Artificial Sequence
  Synthetic Polynucleotide
cgttacygaaactcctgtgtagg

SEQ ID NO: 1793 - DNA, 23 bp, Artificial Sequence
  Synthetic Polynucleotide
cgttcccygaggcaaaagagggg

SEQ ID NO: 1794 - DNA, 23 bp, Artificial Sequence
  Synthetic Polynucleotide
acttycccctaggcggaaagggg

SEQ ID NO: 1795 - DNA, 23 bp, Artificial Sequence
  Synthetic Polynucleotide
gacttycccctaggcggaaaggg

SEQ ID NO: 1796 - DNA, 23 bp, Artificial Sequence
  Synthetic Polynucleotide
ggacttycccctaggcggaaagg

SEQ ID NO: 1797 - DNA, 23 bp, Artificial Sequence
  Synthetic Polynucleotide
ctcyctgccacgtaatacagggg

SEQ ID NO: 1798 - DNA, 23 bp, Artificial Sequence
  Synthetic Polynucleotide
actcyctgccacgtaatacaggg

SEQ ID NO: 1799 - DNA, 23 bp, Artificial Sequence
  Synthetic Polynucleotide
aactcyctgccacgtaatacagg

SEQ ID NO: 1800 - DNA, 23 bp, Artificial Sequence
  Synthetic Polynucleotide
gggtcgyagcgaactgagaaggg

SEQ ID NO: 1801 - DNA, 23 bp, Artificial Sequence
  Synthetic Polynucleotide
tgggtcgyagcgaactgagaagg

SEQ ID NO: 1802 - DNA, 23 bp, Artificial Sequence
  Synthetic Polynucleotide
ggatgycctgctcggtgggctgg

SEQ ID NO: 1803 - DNA, 23 bp, Artificial Sequence
  Synthetic Polynucleotide
ccgcayggggccgaagtctgggg

SEQ ID NO: 1804 - DNA, 23 bp, Artificial Sequence
  Synthetic Polynucleotide
gccgcayggggccgaagtctggg

SEQ ID NO: 1805 - DNA, 23 bp, Artificial Sequence
  Synthetic Polynucleotide
agccgcayggggccgaagtctgg

SEQ ID NO: 1806 - DNA, 23 bp, Artificial Sequence
  Synthetic Polynucleotide
gtacttgyagtcggggtagtcgg

SEQ ID NO: 1807 - DNA, 23 bp, Artificial Sequence
  Synthetic Polynucleotide
ttgytcccccctcggcctcaggg

SEQ ID NO: 1808 - DNA, 23 bp, Artificial Sequence
  Synthetic Polynucleotide
attgytcccccctcggcctcagg

SEQ ID NO: 1809 - DNA, 23 bp, Artificial Sequence
  Synthetic Polynucleotide
ctccyggtgctgaaggacttggg

SEQ ID NO: 1810 - DNA, 23 bp, Artificial Sequence
  Synthetic Polynucleotide
gctccyggtgctgaaggacttgg

SEQ ID NO: 1811 - DNA, 23 bp, Artificial Sequence
  Synthetic Polynucleotide
aatcaygatgtacatccttctgg

SEQ ID NO: 1812 - DNA, 23 bp, Artificial Sequence
  Synthetic Polynucleotide
gataycggtttcattaaggtagg

SEQ ID NO: 1813 - DNA, 23 bp, Artificial Sequence
  Synthetic Polynucleotide
ccacgygctgcgctggctggagg

SEQ ID NO: 1814 - DNA, 23 bp, Artificial Sequence
  Synthetic Polynucleotide
acttcycaccgggtagctcccgg

SEQ ID NO: 1815 - DNA, 23 bp, Artificial Sequence
  Synthetic Polynucleotide
gcayactggcggatggtccaggg

SEQ ID NO: 1816 - DNA, 23 bp, Artificial Sequence
  Synthetic Polynucleotide
agcayactggcggatggtccagg

SEQ ID NO: 1817 - DNA, 23 bp, Artificial Sequence
  Synthetic Polynucleotide
gttccyggaaagcattaagaagg

SEQ ID NO: 1818 - DNA, 23 bp, Artificial Sequence
  Synthetic Polynucleotide
tagcaygaagacggtgaagacgg

SEQ ID NO: 1819 - DNA, 23 bp, Artificial Sequence
  Synthetic Polynucleotide
cgtacyggcggatgccttcccgg

SEQ ID NO: 1820 - DNA, 23 bp, Artificial Sequence
  Synthetic Polynucleotide
aggcccygaggaagcagggacgg

SEQ ID NO: 1821 - DNA, 23 bp, Artificial Sequence
  Synthetic Polynucleotide
ctcayggcacttacctgggatgg

SEQ ID NO: 1822 - DNA, 23 bp, Artificial Sequence
  Synthetic Polynucleotide
tcacagcygcggggaaagggagg

SEQ ID NO: 1823 - DNA, 23 bp, Artificial Sequence
  Synthetic Polynucleotide
ggtaccyggaagacacgaggggg

SEQ ID NO: 1824 - DNA, 23 bp, Artificial Sequence
  Synthetic Polynucleotide
tggtaccyggaagacacgagggg

SEQ ID NO: 1825 - DNA, 23 bp, Artificial Sequence
  Synthetic Polynucleotide
tgccaytgtaattcccacacagg

SEQ ID NO: 1826 - DNA, 23 bp, Artificial Sequence
  Synthetic Polynucleotide
attycaatggcttctgggtctgg

SEQ ID NO: 1827 - DNA, 23 bp, Artificial Sequence
  Synthetic Polynucleotide
atayctggccgcgcttccccagg

SEQ ID NO: 1828 - DNA, 23 bp, Artificial Sequence
  Synthetic Polynucleotide
cgctcaygctgcaggctggacgg

SEQ ID NO: 1829 - DNA, 23 bp, Artificial Sequence
  Synthetic Polynucleotide
gtacytgtccccgtagccaatgg

SEQ ID NO: 1830 - DNA, 23 bp, Artificial Sequence
  Synthetic Polynucleotide
gataycatacaggaatgctgggg

SEQ ID NO: 1831 - DNA, 23 bp, Artificial Sequence
  Synthetic Polynucleotide
agataycatacaggaatgctggg

SEQ ID NO: 1832 - DNA, 23 bp, Artificial Sequence
  Synthetic Polynucleotide
tagataycatacaggaatgctgg

SEQ ID NO: 1833 - DNA, 23 bp, Artificial Sequence
  Synthetic Polynucleotide
cacccyaaagaagaagtggtcgg

SEQ ID NO: 1834 - DNA, 23 bp, Artificial Sequence
  Synthetic Polynucleotide
tttacagygggctctagaggggg

SEQ ID NO: 1835 - DNA, 23 bp, Artificial Sequence
  Synthetic Polynucleotide
ctgycttccttcacctctgctgg

SEQ ID NO: 1836 - DNA, 23 bp, Artificial Sequence
  Synthetic Polynucleotide
agccytgggaaggggggcagcgg

SEQ ID NO: 1837 - DNA, 23 bp, Artificial Sequence
  Synthetic Polynucleotide
ggcccggytggtgtaatacacgg

SEQ ID NO: 1838 - DNA, 23 bp, Artificial Sequence
  Synthetic Polynucleotide
gtatcygggagataggacagagg

SEQ ID NO: 1839 - DNA, 23 bp, Artificial Sequence
  Synthetic Polynucleotide
gcaccayggtgcctggcgggagg

SEQ ID NO: 1840 - DNA, 23 bp, Artificial Sequence
  Synthetic Polynucleotide
agatcyccactgtggttgcctgg

SEQ ID NO: 1841 - DNA, 23 bp, Artificial Sequence
  Synthetic Polynucleotide
aggcccaytgccatacaggatgg

SEQ ID NO: 1842 - DNA, 23 bp, Artificial Sequence
  Synthetic Polynucleotide
gcagyccacccacagccccatgg

SEQ ID NO: 1843 - DNA, 23 bp, Artificial Sequence
  Synthetic Polynucleotide
cggcaayggtgtagcggcggggg

SEQ ID NO: 1844 - DNA, 23 bp, Artificial Sequence
  Synthetic Polynucleotide
gcggcaayggtgtagcggcgggg

SEQ ID NO: 1845 - DNA, 23 bp, Artificial Sequence
  Synthetic Polynucleotide
cgactyggagagacgcctgcagg

SEQ ID NO: 1846 - DNA, 23 bp, Artificial Sequence
  Synthetic Polynucleotide
atatcayctagagggaagggggg

SEQ ID NO: 1847 - DNA, 23 bp, Artificial Sequence
  Synthetic Polynucleotide
catatcayctagagggaaggggg

SEQ ID NO: 1848 - DNA, 23 bp, Artificial Sequence
  Synthetic Polynucleotide
cgccagcygcatttcaaagatgg

SEQ ID NO: 1849 - DNA, 23 bp, Artificial Sequence
  Synthetic Polynucleotide
tagcayatttgcaacaagcttgg

SEQ ID NO: 1850 - DNA, 23 bp, Artificial Sequence
  Synthetic Polynucleotide
gcgggyacttggtgtggatgagg

SEQ ID NO: 1851 - DNA, 23 bp, Artificial Sequence
  Synthetic Polynucleotide
ctgycagggtcaggcacacctgg

SEQ ID NO: 1852 - DNA, 23 bp, Artificial Sequence
  Synthetic Polynucleotide
gcagaccygcacaaaatacaagg

SEQ ID NO: 1853 - DNA, 23 bp, Artificial Sequence
  Synthetic Polynucleotide
cttcaygtgcaggaagcggctgg

SEQ ID NO: 1854 - DNA, 23 bp, Artificial Sequence
  Synthetic Polynucleotide
ccacctycatgtgcaggaagcgg

SEQ ID NO: 1855 - DNA, 23 bp, Artificial Sequence
  Synthetic Polynucleotide
ccgttcygtgggtatagagtggg

SEQ ID NO: 1856 - DNA, 23 bp, Artificial Sequence
  Synthetic Polynucleotide
gccgttcygtgggtatagagtgg

SEQ ID NO: 1857 - DNA, 23 bp, Artificial Sequence
  Synthetic Polynucleotide
ctttcygttgaaataaggatggg

SEQ ID NO: 1858 - DNA, 23 bp, Artificial Sequence
  Synthetic Polynucleotide
tctttcygttgaaataaggatgg

SEQ ID NO: 1859 - DNA, 23 bp, Artificial Sequence
  Synthetic Polynucleotide
ggtcttyctgcacatttgggtgg

SEQ ID NO: 1860 - DNA, 23 bp, Artificial Sequence
  Synthetic Polynucleotide
gtgaaccygaaatgagagggagg

SEQ ID NO: 1861 - DNA, 23 bp, Artificial Sequence
  Synthetic Polynucleotide
gtaccygggtgggggccgcaggg

SEQ ID NO: 1862 - DNA, 23 bp, Artificial Sequence
  Synthetic Polynucleotide
tgtaccygggtgggggccgcagg

SEQ ID NO: 1863 - DNA, 23 bp, Artificial Sequence
  Synthetic Polynucleotide
tcayctttcatgggctcttttgg

SEQ ID NO: 1864 - DNA, 23 bp, Artificial Sequence
  Synthetic Polynucleotide
tatttyacatagttggaatgtgg

SEQ ID NO: 1865 - DNA, 23 bp, Artificial Sequence
  Synthetic Polynucleotide
ggccaayttcctgtaattggggg

SEQ ID NO: 1866 - DNA, 23 bp, Artificial Sequence
  Synthetic Polynucleotide
aggccaayttcctgtaattgggg

SEQ ID NO: 1867 - DNA, 23 bp, Artificial Sequence
  Synthetic Polynucleotide
tccayggcgggtgcgggctcagg

SEQ ID NO: 1868 - DNA, 23 bp, Artificial Sequence
  Synthetic Polynucleotide
aggcgtygaccagcgagtacagg

SEQ ID NO: 1869 - protein, 1052 aa, Artificial Sequence
  Synthetic Polypeptide
KRNYILGLDIGITSVGYGIIDYETRDVIDAGVRLFKEANVENNEGRRSKRGARRLKRRRRHRIQRVKKLLFDYNLLTDHSELSGINPYEARVKGLSQKLSEEEFSAALLHLAKRRGVHNVNEVEEDTGNELSTKEQISRNSKALEEKYVAELQLERLKKDGEVRGSINRFKTSDYVKEAKQLLKVQKAYHQLDQSFIDTYIDLLETRRTYYEGPGEGSPFGWKDIKEWYEMLMGHCTYFPEELRSVKYAYNADLYNALNDLNNLVITRDENEKLEYYEKFQIIENVFKQKKKPTLKQIAKEILVNEEDIKGYRVTSTGKPEFTNLKVYHDIKDITARKEIIENAELLDQIAKILTIYQSSEDIQEELTNLNSELTQEEIEQISNLKGYTGTHNLSLKAINLILDELWHTNDNQIAIFNRLKLVPKKVDLSQQKEIPTTLVDDFILSPVVKRSFIQSIKVINAIIKKYGLPNDIIIELAREKNSKDAQKMINEMQKRNRQTNERIEEIIRTTGKENAKYLIEKIKLHDMQEGKCLYSLEAIPLEDLLNNPFNYEVDHIIPRSVSFDNSFNNKVLVKQEENSKKGNRTPFQYLSSSDSKISYETFKKHILNLAKGKGRISKTKKEYLLEERDINRFSVQKDFINRNLVDTRYATRGLMNLLRSYFRVNNLDVKVKSINGGFTSFLRRKWKFKKERNKGYKHHAEDALIIANADFIFKEWKKLDKAKKVMENQMFEEKQAESMPEIETEQEYKEIFITPHQIKHIKDFKDYKYSHRVDKKPNRELINDTLYSTRKDDKGNTLIVNNLNGLYDKDNDKLKKLINKSPEKLLMYHHDPQTYQKLKLIMEQYGDEKNPLYKYYEETGNYLTKYSKKDNGPVIKKIKYYGNKLNAHLDITDDYPNSRNKVVKLSLKPYRFDVYLDNGVYKFVTVKNLDVIKKENYYEVNSKCYEEAKKLKKISNQAEFIASFYNNDLIKINGELYRVIGVNNDLLNRIEVNMIDITYREYLENMNDKRPPRIIKTIASKTQSIKKYSTDILGNLYEVKSKKHPQIIKKG

SEQ ID NO: 1870 - protein, 1052 aa, Artificial Sequence
  Synthetic Polypeptide
KRNYILGLDIGITSVGYGIIDYETRDVIDAGVRLFKEANVENNEGRRSKRGARRLKRRRRHRIQRVKKLLFDYNLLTDHSELSGINPYEARVKGLSQKLSEEEFSAALLHLAKRRGVHNVNEVEEDTGNELSTKEQISRNSKALEEKYVAELQLERLKKDGEVRGSINRFKTSDYVKEAKQLLKVQKAYHQLDQSFIDTYIDLLETRRTYYEGPGEGSPFGWKDIKEWYEMLMGHCTYFPEELRSVKYAYNADLYNALNDLNNLVITRDENEKLEYYEKFQIIENVFKQKKKPTLKQIAKEILVNEEDIKGYRVTSTGKPEFTNLKVYHDIKDITARKEIIENAELLDQIAKILTIYQSSEDIQEELTNLNSELTQEEIEQISNLKGYTGTHNLSLKAINLILDELWHTNDNQIAIFNRLKLVPKKVDLSQQKEIPTTLVDDFILSPVVKRSFIQSIKVINAIIKKYGLPNDIIIELAREKNSKDAQKMINEMQKRNRQTNERIEEIIRTTGKENAKYLIEKIKLHDMQEGKCLYSLEAIPLEDLLNNPFNYEVDHIIPRSVSFDNSFNNKVLVKQEEASKKGNRTPFQYLSSSDSKISYETFKKHILNLAKGKGRISKTKKEYLLEERDINRFSVQKDFINRNLVDTRYATRGLMNLLRSYFRVNNLDVKVKSINGGFTSFLRRKWKFKKERNKGYKHHAEDALIIANADFIFKEWKKLDKAKKVMENQMFEEKQAESMPEIETEQEYKEIFITPHQIKHIKDFKDYKYSHRVDKKPNRELINDTLYSTRKDDKGNTLIVNNLNGLYDKDNDKLKKLINKSPEKLLMYHHDPQTYQKLKLIMEQYGDEKNPLYKYYEETGNYLTKYSKKDNGPVIKKIKYYGNKLNAHLDITDDYPNSRNKVVKLSLKPYRFDVYLDNGVYKFVTVKNLDVIKKENYYEVNSKCYEEAKKLKKISNQAEFIASFYNNDLIKINGELYRVIGVNNDLLNRIEVNMIDITYREYLENMNDKRPPRIIKTIASKTQSIKKYSTDILGNLYEVKSKKHPQIIKKG

SEQ ID NO: 1871 - protein, 1052 aa, Artificial Sequence
  Synthetic Polypeptide
KRNYILGLDIGITSVGYGIIDYETRDVIDAGVRLFKEANVENNEGRRSKRGARRLKRRRRHRIQRVKKLLFDYNLLTDHSELSGINPYEARVKGLSQKLSEEEFSAALLHLAKRRGVHNVNEVEEDTGNELSTKEQISRNSKALEEKYVAELQLERLKKDGEVRGSINRFKTSDYVKEAKQLLKVQKAYHQLDQSFIDTYIDLLETRRTYYEGPGEGSPFGWKDIKEWYEMLMGHCTYFPEELRSVKYAYNADLYNALNDLNNLVITRDENEKLEYYEKFQIIENVFKQKKKPTLKQIAKEILVNEEDIKGYRVTSTGKPEFTNLKVYHDIKDITARKEIIENAELLDQIAKILTIYQSSEDIQEELTNLNSELTQEEIEQISNLKGYTGTHNLSLKAINLILDELWHTNDNQIAIFNRLKLVPKKVDLSQQKEIPTTLVDDFILSPVVKRSFIQSIKVINAIIKKYGLPNDIIIELAREKNSKDAQKMINEMQKRNRQTNERIEEIIRTTGKENAKYLIEKIKLHDMQEGKCLYSLEAIPLEDLLNNPFNYEVDHIIPRSVSFDNSFNNKVLVKQEEASKKGNRTPFQYLSSSDSKISYETFKKHILNLAKGKGRISKTKKEYLLEERDINRFSVQKDFINRNLVDTRYATRGLMNLLRSYFRVNNLDVKVKSINGGFTSFLRRKWKFKKERNKGYKHHAEDALIIANADFIFKEWKKLDKAKKVMENQMFEEKQAESMPEIETEQEYKEIFITPHQIKHIKDFKDYKYSHRVDKKPNRKLINDTLYSTRKDDKGNTLIVNNLNGLYDKDNDKLKKLINKSPEKLLMYHHDPQTYQKLKLIMEQYGDEKNPLYKYYEETGNYLTKYSKKDNGPVIKKIKYYGNKLNAHLDITDDYPNSRNKVVKLSLKPYRFDVYLDNGVYKFVTVKNLDVIKKENYYEVNSKCYEEAKKLKKISNQAEFIASFYKNDLIKINGELYRVIGVNNDLLNRIEVNMIDITYREYLENMNDKRPPHIIKTIASKTQSIKKYSTDILGNLYEVKSKKHPQIIKKG

SEQ ID NO: 1872 - protein, 1367 aa, Artificial Sequence
  Synthetic Polypeptide
DKKYSIGLDIGTNSVGWAVITDEYKVPSKKFKVLGNTDRHSIKKNLIGALLFDSGETAEATRLKRTARRRYTRRKNRICYLQEIFSNEMAKVDDSFFHRLEESFLVEEDKKHERHPIFGNIVDEVAYHEKYPTIYHLRKKLVDSTDKADLRLIYLALAHMIKFRGHFLIEGDLNPDNSDVDKLFIQLVQTYNQLFEENPINASGVDAKAILSARLSKSRRLENLIAQLPGEKKNGLFGNLIALSLGLTPNFKSNFDLAEDAKLQLSKDTYDDDLDNLLAQIGDQYADLFLAAKNLSDAILLSDILRVNTEITKAPLSASMIKRYDEHHQDLTLLKALVRQQLPEKYKEIFFDQSKNGYAGYIDGGASQEEFYKFIKPILEKMDGTEELLVKLNREDLLRKQRTFDNGSIPHQIHLGELHAILRRQEDFYPFLKDNREKIEKILTFRIPYYVGPLARGNSRFAWMTRKSEETITPWNFEEVVDKGASAQSFIERMTNFDKNLPNEKVLPKHSLLYEYFTVYNELTKVKYVTEGMRKPAFLSGEQKKAIVDLLFKTNRKVTVKQLKEDYFKKIECFDSVEISGVEDRFNASLGTYHDLLKIIKDKDFLDNEENEDILEDIVLTLTLFEDREMIEERLKTYAHLFDDKVMKQLKRRRYTGWGRLSRKLINGIRDKQSGKTILDFLKSDGFANRNFMQLIHDDSLTFKEDIQKAQVSGQGDSLHEHIANLAGSPAIKKGILQTVKVVDELVKVMGRHKPENIVIEMARENQTTQKGQKNSRERMKRIEEGIKELGSQILKEHPVENTQLQNEKLYLYYLQNGRDMYVDQELDINRLSDYDVDHIVPQSFLKDDSIDNKVLTRSDKNRGKSDNVPSEEVVKKMKNYWRQLLNAKLITQRKFDNLTKAERGGLSELDKAGFIKRQLVETRQITKHVAQILDSRMNTKYDENDKLIREVKVITLKSKLVSDFRKDFQFYKVREINNYHHAHDAYLNAVVGTALIKKYPKLESEFVYGDYKVYDVRKMIAKSEQEIGKATAKYFFYSNIMNFFKTEITLANGEIRKRPLIETNGETGEIVWDKGRDFATVRKVLSMPQVNIVKKTEVQTGGFSKESILPKRNSDKLIARKKDWDPKKYGGFDSPTVAYSVLVVAKVEKGKSKKLKSVKELLGITIMERSSFEKNPIDFLEAKGYKEVKKDLIIKLPKYSLFELENGRKRMLASAGELQKGNELALPSKYVNFLYLASHYEKLKGSPEDNEQKQLFVEQHKHYLDEIIEQISEFSKRVILADANLDKVLSAYNKHRDKPIREQAENIIHLFTLTNLGAPAAFKYFDTTIDRKRYTSTKEVLDATLIHQSITGLYETRIDLSQLGGD

SEQ ID NO: 1873 - protein, 1367 aa, Artificial Sequence
  Synthetic Polypeptide
DKKYSIGLAIGTNSVGWAVITDEYKVPSKKFKVLGNTDRHSIKKNLIGALLFDSGETAEATRLKRTARRRYTRRKNRICYLQEIFSNEMAKVDDSFFHRLEESFLVEEDKKHERHPIFGNIVDEVAYHEKYPTIYHLRKKLVDSTDKADLRLIYLALAHMIKFRGHFLIEGDLNPDNSDVDKLFIQLVQTYNQLFEENPINASGVDAKAILSARLSKSRRLENLIAQLPGEKKNGLFGNLIALSLGLTPNFKSNFDLAEDAKLQLSKDTYDDDLDNLLAQIGDQYADLFLAAKNLSDAILLSDILRVNTEITKAPLSASMIKRYDEHHQDLTLLKALVRQQLPEKYKEIFFDQSKNGYAGYIDGGASQEEFYKFIKPILEKMDGTEELLVKLNREDLLRKQRTFDNGSIPHQIHLGELHAILRRQEDFYPFLKDNREKIEKILTFRIPYYVGPLARGNSRFAWMTRKSEETITPWNFEEVVDKGASAQSFIERMTNFDKNLPNEKVLPKHSLLYEYFTVYNELTKVKYVTEGMRKPAFLSGEQKKAIVDLLFKTNRKVTVKQLKEDYFKKIECFDSVEISGVEDRFNASLGTYHDLLKIIKDKDFLDNEENEDILEDIVLTLTLFEDREMIEERLKTYAHLFDDKVMKQLKRRRYTGWGRLSRKLINGIRDKQSGKTILDFLKSDGFANRNFMQLIHDDSLTFKEDIQKAQVSGQGDSLHEHIANLAGSPAIKKGILQTVKVVDELVKVMGRHKPENIVIEMARENQTTQKGQKNSRERMKRIEEGIKELGSQILKEHPVENTQLQNEKLYLYYLQNGRDMYVDQELDINRLSDYDVDHIVPQSFLKDDSIDNKVLTRSDKNRGKSDNVPSEEVVKKMKNYWRQLLNAKLITQRKFDNLTKAERGGLSELDKAGFIKRQLVETRQITKHVAQILDSRMNTKYDENDKLIREVKVITLKSKLVSDFRKDFQFYKVREINNYHHAHDAYLNAVVGTALIKKYPKLESEFVYGDYKVYDVRKMIAKSEQEIGKATAKYFFYSNIMNFFKTEITLANGEIRKRPLIETNGETGEIVWDKGRDFATVRKVLSMPQVNIVKKTEVQTGGFSKESILPKRNSDKLIARKKDWDPKKYGGFDSPTVAYSVLVVAKVEKGKSKKLKSVKELLGITIMERSSFEKNPIDFLEAKGYKEVKKDLIIKLPKYSLFELENGRKRMLASAGELQKGNELALPSKYVNFLYLASHYEKLKGSPEDNEQKQLFVEQHKHYLDEIIEQISEFSKRVILADANLDKVLSAYNKHRDKPIREQAENIIHLFTLTNLGAPAAFKYFDTTIDRKRYTSTKEVLDATLIHQSITGLYETRIDLSQLGGD

SEQ ID NO: 1874 - protein, 1367 aa, Artificial Sequence
  Synthetic Polypeptide
DKKYSIGLAIGTNSVGWAVITDEYKVPSKKFKVLGNTDRHSIKKNLIGALLFDSGETAEATRLKRTARRRYTRRKNRICYLQEIFSNEMAKVDDSFFHRLEESFLVEEDKKHERHPIFGNIVDEVAYHEKYPTIYHLRKKLVDSTDKADLRLIYLALAHMIKFRGHFLIEGDLNPDNSDVDKLFIQLVQTYNQLFEENPINASGVDAKAILSARLSKSRRLENLIAQLPGEKKNGLFGNLIALSLGLTPNFKSNFDLAEDAKLQLSKDTYDDDLDNLLAQIGDQYADLFLAAKNLSDAILLSDILRVNTEITKAPLSASMIKRYDEHHQDLTLLKALVRQQLPEKYKEIFFDQSKNGYAGYIDGGASQEEFYKFIKPILEKMDGTEELLVKLNREDLLRKQRTFDNGSIPHQIHLGELHAILRRQEDFYPFLKDNREKIEKILTFRIPYYVGPLARGNSRFAWMTRKSEETITPWNFEEVVDKGASAQSFIERMTNFDKNLPNEKVLPKHSLLYEYFTVYNELTKVKYVTEGMRKPAFLSGEQKKAIVDLLFKTNRKVTVKQLKEDYFKKIECFDSVEISGVEDRFNASLGTYHDLLKIIKDKDFLDNEENEDILEDIVLTLTLFEDREMIEERLKTYAHLFDDKVMKQLKRRRYTGWGRLSRKLINGIRDKQSGKTILDFLKSDGFANRNFMQLIHDDSLTFKEDIQKAQVSGQGDSLHEHIANLAGSPAIKKGILQTVKVVDELVKVMGRHKPENIVIEMARENQTTQKGQKNSRERMKRIEEGIKELGSQILKEHPVENTQLQNEKLYLYYLQNGRDMYVDQELDINRLSDYDVDHIVPQSFLKDDSIDNKVLTRSDKNRGKSDNVPSEEVVKKMKNYWRQLLNAKLITQRKFDNLTKAERGGLSELDKAGFIKRQLVETRQITKHVAQILDSRMNTKYDENDKLIREVKVITLKSKLVSDFRKDFQFYKVREINNYHHAHDAYLNAVVGTALIKKYPKLESEFVYGDYKVYDVRKMIAKSEQEIGKATAKYFFYSNIMNFFKTEITLANGEIRKRPLIETNGETGEIVWDKGRDFATVRKVLSMPQVNIVKKTEVQTGGFSKESILPKRNSDKLIARKKDWDPKKYGGFESPTVAYSVLVVAKVEKGKSKKLKSVKELLGITIMERSSFEKNPIDFLEAKGYKEVKKDLIIKLPKYSLFELENGRKRMLASAGELQKGNELALPSKYVNFLYLASHYEKLKGSPEDNEQKQLFVEQHKHYLDEIIEQISEFSKRVILADANLDKVLSAYNKHRDKPIREQAENIIHLFTLTNLGAPAAFKYFDTTIDRKQYRSTKEVLDATLIHQSITGLYETRIDLSQLGGD

SEQ ID NO: 1875 - protein, 1367 aa, Artificial Sequence
  Synthetic Polypeptide
DKKYSIGLAIGTNSVGWAVITDEYKVPSKKFKVLGNTDRHSIKKNLIGALLFDSGETAEATRLKRTARRRYTRRKNRICYLQEIFSNEMAKVDDSFFHRLEESFLVEEDKKHERHPIFGNIVDEVAYHEKYPTIYHLRKKLVDSTDKADLRLIYLALAHMIKFRGHFLIEGDLNPDNSDVDKLFIQLVQTYNQLFEENPINASGVDAKAILSARLSKSRRLENLIAQLPGEKKNGLFGNLIALSLGLTPNFKSNFDLAEDAKLQLSKDTYDDDLDNLLAQIGDQYADLFLAAKNLSDAILLSDILRVNTEITKAPLSASMIKRYDEHHQDLTLLKALVRQQLPEKYKEIFFDQSKNGYAGYIDGGASQEEFYKFIKPILEKMDGTEELLVKLNREDLLRKQRTFDNGSIPHQIHLGELHAILRRQEDFYPFLKDNREKIEKILTFRIPYYVGPLARGNSRFAWMTRKSEETITPWNFEEVVDKGASAQSFIERMTNFDKNLPNEKVLPKHSLLYEYFTVYNELTKVKYVTEGMRKPAFLSGEQKKAIVDLLFKTNRKVTVKQLKEDYFKKIECFDSVEISGVEDRFNASLGTYHDLLKIIKDKDFLDNEENEDILEDIVLTLTLFEDREMIEERLKTYAHLFDDKVMKQLKRRRYTGWGRLSRKLINGIRDKQSGKTILDFLKSDGFANRNFMQLIHDDSLTFKEDIQKAQVSGQGDSLHEHIANLAGSPAIKKGILQTVKVVDELVKVMGRHKPENIVIEMARENQTTQKGQKNSRERMKRIEEGIKELGSQILKEHPVENTQLQNEKLYLYYLQNGRDMYVDQELDINRLSDYDVDHIVPQSFLKDDSIDNKVLTRSDKNRGKSDNVPSEEVVKKMKNYWRQLLNAKLITQRKFDNLTKAERGGLSELDKAGFIKRQLVETRQITKHVAQILDSRMNTKYDENDKLIREVKVITLKSKLVSDFRKDFQFYKVREINNYHHAHDAYLNAVVGTALIKKYPKLESEFVYGDYKVYDVRKMIAKSEQEIGKATAKYFFYSNIMNFFKTEITLANGEIRKRPLIETNGETGEIVWDKGRDFATVRKVLSMPQVNIVKKTEVQTGGFSKESILPKRNSDKLIARKKDWDPKKYGGFVSPTVAYSVLVVAKVEKGKSKKLKSVKELLGITIMERSSFEKNPIDFLEAKGYKEVKKDLIIKLPKYSLFELENGRKRMLASAGELQKGNELALPSKYVNFLYLASHYEKLKGSPEDNEQKQLFVEQHKHYLDEIIEQISEFSKRVILADANLDKVLSAYNKHRDKPIREQAENIIHLFTLTNLGAPAAFKYFDTTIDRKQYRSTKEVLDATLIHQSITGLYETRIDLSQLGGD

SEQ ID NO: 1876 - protein, 1367 aa, Artificial Sequence
  Synthetic Polypeptide
DKKYSIGLAIGTNSVGWAVITDEYKVPSKKFKVLGNTDRHSIKKNLIGALLFDSGETAEATRLKRTARRRYTRRKNRICYLQEIFSNEMAKVDDSFFHRLEESFLVEEDKKHERHPIFGNIVDEVAYHEKYPTIYHLRKKLVDSTDKADLRLIYLALAHMIKFRGHFLIEGDLNPDNSDVDKLFIQLVQTYNQLFEENPINASGVDAKAILSARLSKSRRLENLIAQLPGEKKNGLFGNLIALSLGLTPNFKSNFDLAEDAKLQLSKDTYDDDLDNLLAQIGDQYADLFLAAKNLSDAILLSDILRVNTEITKAPLSASMIKRYDEHHQDLTLLKALVRQQLPEKYKEIFFDQSKNGYAGYIDGGASQEEFYKFIKPILEKMDGTEELLVKLNREDLLRKQRTFDNGSIPHQIHLGELHAILRRQEDFYPFLKDNREKIEKILTFRIPYYVGPLARGNSRFAWMTRKSEETITPWNFEEVVDKGASAQSFIERMTNFDKNLPNEKVLPKHSLLYEYFTVYNELTKVKYVTEGMRKPAFLSGEQKKAIVDLLFKTNRKVTVKQLKEDYFKKIECFDSVEISGVEDRFNASLGTYHDLLKIIKDKDFLDNEENEDILEDIVLTLTLFEDREMIEERLKTYAHLFDDKVMKQLKRRRYTGWGRLSRKLINGIRDKQSGKTILDFLKSDGFANRNFMQLIHDDSLTFKEDIQKAQVSGQGDSLHEHIANLAGSPAIKKGILQTVKVVDELVKVMGRHKPENIVIEMARENQTTQKGQKNSRERMKRIEEGIKELGSQILKEHPVENTQLQNEKLYLYYLQNGRDMYVDQELDINRLSDYDVDHIVPQSFLKDDSIDNKVLTRSDKNRGKSDNVPSEEVVKKMKNYWRQLLNAKLITQRKFDNLTKAERGGLSELDKAGFIKRQLVETRQITKHVAQILDSRMNTKYDENDKLIREVKVITLKSKLVSDFRKDFQFYKVREINNYHHAHDAYLNAVVGTALIKKYPKLESEFVYGDYKVYDVRKMIAKSEQEIGKATAKYFFYSNIMNFFKTEITLANGEIRKRPLIETNGETGEIVWDKGRDFATVRKVLSMPQVNIVKKTEVQTGGFSKESILPKRNSDKLIARKKDWDPKKYGGFVSPTVAYSVLVVAKVEKGKSKKLKSVKELLGITIMERSSFEKNPIDFLEAKGYKEVKKDLIIKLPKYSLFELENGRKRMLASARELQKGNELALPSKYVNFLYLASHYEKLKGSPEDNEQKQLFVEQHKHYLDEIIEQISEFSKRVILADANLDKVLSAYNKHRDKPIREQAENIIHLFTLTNLGAPAAFKYFDTTIDRKEYRSTKEVLDATLIHQSITGLYETRIDLSQLGGD

SEQ ID NO: 1877 - protein, 4 aa, Artificial Sequence
  Synthetic Polypeptide
  VARIANT (1)...(4): Can be present in repeats of any integer between 1 to 30
SGGS

SEQ ID NO: 1878 - protein, 236 aa, Homo sapiens; identical to SEQ ID NO: 282

SEQ ID NO: 1879 - protein, 239 aa, Rattus rattus
MAVGSKPKAALVGPHWERERIWCFLCSTGLGTQQTGQTSRWLRPAATQDPVSPPRSLLMKQRKFLYHFKNVRWAKGRHETYLCYVVKRRDSATSFSLDFGYLRNKSGCHVELLFLRYISDWDLDPGRCYRVTWFTSWSPCYDCARHVADFLRGNPNLSLRIFTARLTGWGALPAGLMSPARPSDYFYCWNTFVENHERTFKAWEGLHENSVRLSRRLRRILLPLYEVDDLRDAFRTLGL

SEQ ID NO: 1880 - protein, 190 aa, Gorilla gorilla
MNPQIRNPMKAMYPGTFYFQFKNLWEANDRNETWLCFTVEGIKRRSVVSWKTGVFRNQVDSETHCHAERCFLSWFCDDILSPNTNYQVTWYTSWSPCPECAGEVAEFLARHSNVNLTIFTARLYYFQDTDYQEGLRSLSQEGVAVKIMDYKDFKYCWENFVYNDDEPFKPWKGLKYNFRFLKRRLQEILE

SEQ ID NO: 1881 - protein, 202 aa, Macaca mulatta
MDGSPASRPRHLMDPNTFTFNFNNDLSVRGRHQTYLCYEVERLDNGTWVPMDERRGFLCNKAKNVPCGDYGCHVELRFLCEVPSWQLDPAQTYRVTWFISWSPCFRRGCAGQVRVFLQENKHVRLRIFAARIYDYDPLYQEALRTLRDAGAQVSIMTYEEFKHCWDTFVDRQGRPFQPWDGLDEHSQALSGRLRAILQNQGN

SEQ ID NO: 1882 - protein, 185 aa, Bos taurus
MDEYTFTENFNNQGWPSKTYLCYEMERLDGDATIPLDEYKGFVRNKGLDQPEKPCHAELYFLGKIHSWNLDRNQHYRLTCFISWSPCYDCAQKLTTFLKENHHISLHILASRIYTHNRFGCHQSGLCELQAAGARITIMTFEDFKHCWETFVDHKGKPFQPWEGLNVKSQALCTELQAILKTQQN

SEQ ID NO: 1883 - protein, 396 aa, Rattus rattus
MQPQGLGPNAGMGPVCLGCSHRRPYSPIRNPLKKLYQQTFYFHFKNVRYAWGRKNNFLCYEVNGMDCALPVPLRQGVFRKQGHIHAELCFIYWFHDKVLRVLSPMEEFKVTWYMSWSPCSKCAEQVARFLAAHRNLSLAIFSSRLYYYLRNPNYQQKLCRLIQEGVHVAAMDLPEFKKCWNKFVDNDGQPFRPWMRLRINFSFYDCKLQEIFSRMNLLREDVFYLQFNNSHRVKPVQNRYYRRKSYLCYQLERANGQEPLKGYLLYKKGEQHVEILFLEKMRSMELSQVRITCYLTWSPCPNCARQLAAFKKDHPDLILRIYTSRLYFYWRKKFQKGLCTLWRSGIHVDVMDLPQFADCWTNFVNPQRPFRPWNELEKNSWRIQRRLRRIKESWGL

SEQ ID NO: 1884 - protein, 227 aa, Bos taurus
DGWEVAFRSGTVLKAGVLGVSMTEGWAGSGHPGQGACVWTPGTRNTMNLLREVLFKQQFGNQPRVPAPYYRRKTYLCYQLKQRNDLTLDRGCFRNKKQRHAEIRFIDKINSLDLNPSQSYKIICYITWSPCPNCANELVNFITRNNHLKLEIFASRLYFHWIKSFKMGLQDLQNAGISVAVMTHTEFEDCWEQFVDNQSRPFQPWDKLEQYSASIRRRLQRILTAPI

SEQ ID NO: 1885 - protein, 490 aa, Pan troglodytes
MNPQIRNPMEWMYQRTFYYNFENEPILYGRSYTWLCYEVKIRRGHSNLLWDTGVFRGQMYSQPEHHAEMCFLSWFCGNQLSAYKCFQITWFVSWTPCPDCVAKLAKFLAEHPNVTLTISAARLYYYWERDYRRALCRLSQAGARVKIMDDEEFAYCWENFVYNEGQPFMPWYKFDDNYAFLHRTLKEIIRHLMDPDTFTFNFNNDPLVLRRHQTYLCYEVERLDNGTWVLMDQHMGFLCNEAKNLLCGFYGRHAELRFLDLVPSLQLDPAQIYRVTWFISWSPCFSWGCAGQVRAFLQENTHVRLRIFAARIYDYDPLYKEALQMLRDAGAQVSIMTYDEFEYCWDTFVYRQGCPFQPWDGLEEHSQALSGRLRAILQVRASSLCMVPHRPPPPPQSPGPCLPLCSEPPLGSLLPTGRPAPSLPFLLTASFSFPPPASLPPLPSLSLSPGHLPVPSFHSLTSCSIQPPCSSRIRETEGWASVSKEGRDLG

SEQ ID NO: 1886 - protein, 210 aa, Macaca mulatta
MALLTAKTFSLQFNNKRRVNKPYYPRKALLCYQLTPQNGSTPTRGHLKNKKKDHAEIRFINKIKSMGLDETQCYQVTCYLTWSPCPSCAGELVDFIKAHRHLNLRIFASRLYYHWRPNYQEGLLLLCGSQVPVEVMGLPEFTDCWENFVDHKEPPSFNPSEKLEELDKNSQAIKRRLERIKSRSVDVLENGLRSLQLGPVTPSSSIRNSR

SEQ ID NO: 1887 - protein, 224 aa, Homo sapiens
MAQKEEAAVATEAASQNGEDLENLDDPEKLKELIELPPFEIVTGERLPANFFKFQFRNVEYSSGRNKTFLCYVVEAQGKGGQVQASRGYLEDEHAAAHAEEAFFNTILPAFDPALRYNVTWYVSSSPCAACADRIIKTLSKTKNLRLLILVGRLFMWEEPEIQAALKKLKEAGCKLRIMKPQDFEYVWQNFVEQEEGESKAFQPWEDIQENFLYYEEKLADILK

SEQ ID NO: 1888 - protein, 224 aa, Mus musculus
MAQKEEAAEAAAPASQNGDDLENLEDPEKLKELIDLPPFEIVTGVRLPVNFFKFQFRNVEYSSGRNKTFLCYVVEVQSKGGQAQATQGYLEDEHAGAHAEEAFFNTILPAFDPALKYNVTWYVSSSPCAACADRILKTLSKTKNLRLLILVSRLFMWEEPEVQAALKKLKEAGCKLRIMKPQDFEYIWQNFVEQEEGESKAFEPWEDIQENFLYYEEKLADILK

SEQ ID NO: 1889 - protein, 224 aa, Rattus rattus
MAQKEEAAEAAAPASQNGDDLENLEDPEKLKELIDLPPFEIVTGVRLPVNFFKFQFRNVEYSSGRNKTFLCYVVEAQSKGGQVQATQGYLEDEHAGAHAEEAFFNTILPAFDPALKYNVTWYVSSSPCAACADRILKTLSKTKNLRLLILVSRLFMWEEPEVQAALKKLKEAGCKLRIMKPQDFEYLWQNFVEQEEGESKAFEPWEDIQENFLYYEEKLADILK

SEQ ID NO: 1890 - protein, 224 aa, Bos taurus
MAQKEEAAAAAEPASQNGEEVENLEDPEKLKELIELPPFEIVTGERLPAHYFKFQFRNVEYSSGRNKTFLCYVVEAQSKGGQVQASRGYLEDEHATNHAEEAFFNSIMPTFDPALRYMVTWYVSSSPCAACADRIVKTLNKTKNLRLLILVGRLFMWEEPEIQAALRKLKEAGCRLRIMKPQDFEYIWQNFVEQEEGESKAFEPWEDIQENFLYYEEKLADILK

SEQ ID NO: 1891 - protein, 208 aa, Petromyzon marinus; identical to SEQ ID NO: 609

SEQ ID NO: 1892 - protein, 384 aa, Artificial Sequence
  Synthetic Polypeptide
MKPHFRNTVERMYRDTFSYNFYNRPILSRRNTVWLCYEVKTKGPSRPPLDAKIFRGQVYSELKYHPEMRFFHWFSKWRKLHRDQEYEVTWYISWSPCTKCTRDMATFLAEDPKVTLTIFVARLYYFWDPDYQEALRSLCQKRDGPRATMKIMNYDEFQHCWSKFVYSQRELFEPWNNLPKYYILLHIMLGEILRHSMDPPTFTFNFNNEPWVRGRHETYLCYEVERMHNDTWVLLNQRRGFLCNQAPHKHGFLEGRHAELCFLDVIPFWKLDLDQDYRVTCFTSWSPCFSCAQEMAKFISKNKHVSLCIFTARIYRRQGRCQEGLRTLAEAGAKISIMTYSEFKHCWDTFVDHQGCPFQPWDGLDEHSQDLSGRLRAILQNQEN

SEQ ID NO: 1893 - protein, 184 aa, Homo sapiens
MDPPTFTFNFNNEPWVRGRHETYLCYEVERMHNDTWVLLNQRRGFLCNQAPHKHGFLEGRHAELCFLDVIPFWKLDLDQDYRVTCFTSWSPCFSCAQEMAKFISKNKHVSLCIFTARIYDDQGRCQEGLRTLAEAGAKISIMTYSEFKHCWDTFVDHQGCPFQPWDGLDEHSQDLSGRLRAILQ

SEQ ID NO: 1894 - protein, 184 aa, Artificial Sequence
  Synthetic Polypeptide
MDPPTFTFNFNNEPWVRGRHETYLCYEVERMHNDTWVLLNQRRGFLCNQAPHKHGFLEGRHAELCFLDVIPFWKLDLDQDYRVTCFTSWSPCFSCAQEMAKFISKNKHVSLCIFTARIYRRQGRCQEGLRTLAEAGAKISIMTYSEFKHCWDTFVDHQGCPFQPWDGLDEHSQDLSGRLRAILQ
